United States Patent Application Publication US 2004/0127446 A1 - sequence listing, part 2

SEQ ID NO: 12478 - DNA, 31 bp, Artificial Sequence
  Description of Artificial Sequence:  Nucleic Acid
  misc_feature: DNAzyme
atgacggaggctagctacaacgaacgtcgag

SEQ ID NO: 12479 - DNA, 31 bp, Artificial Sequence
  Description of Artificial Sequence:  Nucleic Acid
  misc_feature: DNAzyme
cggtatgaggctagctacaacgaggacacgt

SEQ ID NO: 12480 - DNA, 31 bp, Artificial Sequence
  Description of Artificial Sequence:  Nucleic Acid
  misc_feature: DNAzyme
ggccggtaggctagctacaacgagacggaca

SEQ ID NO: 12481 - DNA, 31 bp, Artificial Sequence
  Description of Artificial Sequence:  Nucleic Acid
  misc_feature: DNAzyme
ctggccggggctagctacaacgaatgacgga

SEQ ID NO: 12482 - DNA, 31 bp, Artificial Sequence
  Description of Artificial Sequence:  Nucleic Acid
  misc_feature: DNAzyme
cccgctggggctagctacaacgacggtatga

SEQ ID NO: 12483 - DNA, 31 bp, Artificial Sequence
  Description of Artificial Sequence:  Nucleic Acid
  misc_feature: DNAzyme
cgtccccgggctagctacaacgatggccggt

SEQ ID NO: 12484 - DNA, 31 bp, Artificial Sequence
  Description of Artificial Sequence:  Nucleic Acid
  misc_feature: DNAzyme
caacgacgggctagctacaacgaccccgctg

SEQ ID NO: 12485 - DNA, 31 bp, Artificial Sequence
  Description of Artificial Sequence:  Nucleic Acid
  misc_feature: DNAzyme
gacaacgaggctagctacaacgagtccccgc

SEQ ID NO: 12486 - DNA, 31 bp, Artificial Sequence
  Description of Artificial Sequence:  Nucleic Acid
  misc_feature: DNAzyme
cacgacaaggctagctacaacgagacgtccc

SEQ ID NO: 12487 - DNA, 31 bp, Artificial Sequence
  Description of Artificial Sequence:  Nucleic Acid
  misc_feature: DNAzyme
tgccacgaggctagctacaacgaaacgacgt

SEQ ID NO: 12488 - DNA, 31 bp, Artificial Sequence
  Description of Artificial Sequence:  Nucleic Acid
  misc_feature: DNAzyme
tgttgccaggctagctacaacgagacaacga

SEQ ID NO: 12489 - DNA, 31 bp, Artificial Sequence
  Description of Artificial Sequence:  Nucleic Acid
  misc_feature: DNAzyme
gtctgttgggctagctacaacgacacgacaa

SEQ ID NO: 12490 - DNA, 31 bp, Artificial Sequence
  Description of Artificial Sequence:  Nucleic Acid
  misc_feature: DNAzyme
agcgtctgggctagctacaacgatgccacga

SEQ ID NO: 12491 - DNA, 31 bp, Artificial Sequence
  Description of Artificial Sequence:  Nucleic Acid
  misc_feature: DNAzyme
ttagagcgggctagctacaacgactgttgcc

SEQ ID NO: 12492 - DNA, 31 bp, Artificial Sequence
  Description of Artificial Sequence:  Nucleic Acid
  misc_feature: DNAzyme
cattagagggctagctacaacgagtctgttg

SEQ ID NO: 12493 - DNA, 31 bp, Artificial Sequence
  Description of Artificial Sequence:  Nucleic Acid
  misc_feature: DNAzyme
gcccgtcaggctagctacaacgatagagcgt

SEQ ID NO: 12494 - DNA, 31 bp, Artificial Sequence
  Description of Artificial Sequence:  Nucleic Acid
  misc_feature: DNAzyme
atagcccgggctagctacaacgacattagag

SEQ ID NO: 12495 - DNA, 31 bp, Artificial Sequence
  Description of Artificial Sequence:  Nucleic Acid
  misc_feature: DNAzyme
cggtatagggctagctacaacgaccgtcatt

SEQ ID NO: 12496 - DNA, 31 bp, Artificial Sequence
  Description of Artificial Sequence:  Nucleic Acid
  misc_feature: DNAzyme
cgccggtaggctagctacaacgaagcccgtc

SEQ ID NO: 12497 - DNA, 31 bp, Artificial Sequence
  Description of Artificial Sequence:  Nucleic Acid
  misc_feature: DNAzyme
atcgccggggctagctacaacgaatagcccg

SEQ ID NO: 12498 - DNA, 31 bp, Artificial Sequence
  Description of Artificial Sequence:  Nucleic Acid
  misc_feature: DNAzyme
caaaatcgggctagctacaacgacggtatag

SEQ ID NO: 12499 - DNA, 31 bp, Artificial Sequence
  Description of Artificial Sequence:  Nucleic Acid
  misc_feature: DNAzyme
agtcaaaaggctagctacaacgacgccggta

SEQ ID NO: 12500 - DNA, 31 bp, Artificial Sequence
  Description of Artificial Sequence:  Nucleic Acid
  misc_feature: DNAzyme
tcaccgagggctagctacaacgacaaaatcg

SEQ ID NO: 12501 - DNA, 31 bp, Artificial Sequence
  Description of Artificial Sequence:  Nucleic Acid
  misc_feature: DNAzyme
gtcgatcaggctagctacaacgacgagtcaa

SEQ ID NO: 12502 - DNA, 31 bp, Artificial Sequence
  Description of Artificial Sequence:  Nucleic Acid
  misc_feature: DNAzyme
acagtcgaggctagctacaacgacaccgagt

SEQ ID NO: 12503 - DNA, 31 bp, Artificial Sequence
  Description of Artificial Sequence:  Nucleic Acid
  misc_feature: DNAzyme
tattacagggctagctacaacgacgatcacc

SEQ ID NO: 12504 - DNA, 31 bp, Artificial Sequence
  Description of Artificial Sequence:  Nucleic Acid
  misc_feature: DNAzyme
atgtattaggctagctacaacgaagtcgatc

SEQ ID NO: 12505 - DNA, 31 bp, Artificial Sequence
  Description of Artificial Sequence:  Nucleic Acid
  misc_feature: DNAzyme
cacatgtaggctagctacaacgatacagtcg

SEQ ID NO: 12506 - DNA, 31 bp, Artificial Sequence
  Description of Artificial Sequence:  Nucleic Acid
  misc_feature: DNAzyme
gacacatgggctagctacaacgaattacagt

SEQ ID NO: 12507 - DNA, 31 bp, Artificial Sequence
  Description of Artificial Sequence:  Nucleic Acid
  misc_feature: DNAzyme
gtgacacaggctagctacaacgagtattaca

SEQ ID NO: 12508 - DNA, 31 bp, Artificial Sequence
  Description of Artificial Sequence:  Nucleic Acid
  misc_feature: DNAzyme
gggtgacaggctagctacaacgaatgtatta

SEQ ID NO: 12509 - DNA, 31 bp, Artificial Sequence
  Description of Artificial Sequence:  Nucleic Acid
  misc_feature: DNAzyme
ttgggtgaggctagctacaacgaacatgtat

SEQ ID NO: 12510 - DNA, 31 bp, Artificial Sequence
  Description of Artificial Sequence:  Nucleic Acid
  misc_feature: DNAzyme
tgtttgggggctagctacaacgagacacatg

SEQ ID NO: 12511 - DNA, 31 bp, Artificial Sequence
  Description of Artificial Sequence:  Nucleic Acid
  misc_feature: DNAzyme
gtcgactgggctagctacaacgattgggtga

SEQ ID NO: 12512 - DNA, 31 bp, Artificial Sequence
  Description of Artificial Sequence:  Nucleic Acid
  misc_feature: DNAzyme
gaagtcgaggctagctacaacgatgtttggg

SEQ ID NO: 12513 - DNA, 31 bp, Artificial Sequence
  Description of Artificial Sequence:  Nucleic Acid
  misc_feature: DNAzyme
agctgaagggctagctacaacgacgactgtt

SEQ ID NO: 12514 - DNA, 31 bp, Artificial Sequence
  Description of Artificial Sequence:  Nucleic Acid
  misc_feature: DNAzyme
ggtccaagggctagctacaacgatgaagtcg

SEQ ID NO: 12515 - DNA, 31 bp, Artificial Sequence
  Description of Artificial Sequence:  Nucleic Acid
  misc_feature: DNAzyme
aggtagggggctagctacaacgaccaagctg

SEQ ID NO: 12516 - DNA, 31 bp, Artificial Sequence
  Description of Artificial Sequence:  Nucleic Acid
  misc_feature: DNAzyme
ggtgaaggggctagctacaacgaagggtcca

SEQ ID NO: 12517 - DNA, 31 bp, Artificial Sequence
  Description of Artificial Sequence:  Nucleic Acid
  misc_feature: DNAzyme
ctcaatggggctagctacaacgagaaggtag

SEQ ID NO: 12518 - DNA, 31 bp, Artificial Sequence
  Description of Artificial Sequence:  Nucleic Acid
  misc_feature: DNAzyme
cgtctcaaggctagctacaacgaggtgaagg

SEQ ID NO: 12519 - DNA, 31 bp, Artificial Sequence
  Description of Artificial Sequence:  Nucleic Acid
  misc_feature: DNAzyme
ggtcgtcgggctagctacaacgactcaatgg

SEQ ID NO: 12520 - DNA, 31 bp, Artificial Sequence
  Description of Artificial Sequence:  Nucleic Acid
  misc_feature: DNAzyme
cacggtcgggctagctacaacgacgtctcaa

SEQ ID NO: 12521 - DNA, 31 bp, Artificial Sequence
  Description of Artificial Sequence:  Nucleic Acid
  misc_feature: DNAzyme
gggcacggggctagctacaacgacgtcgtct

SEQ ID NO: 12522 - DNA, 31 bp, Artificial Sequence
  Description of Artificial Sequence:  Nucleic Acid
  misc_feature: DNAzyme
ttggggcaggctagctacaacgaggtcgtcg

SEQ ID NO: 12523 - DNA, 31 bp, Artificial Sequence
  Description of Artificial Sequence:  Nucleic Acid
  misc_feature: DNAzyme
tcttggggggctagctacaacgaacggtcgt

SEQ ID NO: 12524 - DNA, 31 bp, Artificial Sequence
  Description of Artificial Sequence:  Nucleic Acid
  misc_feature: DNAzyme
acactgcgggctagctacaacgacttggggc

SEQ ID NO: 12525 - DNA, 31 bp, Artificial Sequence
  Description of Artificial Sequence:  Nucleic Acid
  misc_feature: DNAzyme
ggacactgggctagctacaacgagtcttggg

SEQ ID NO: 12526 - DNA, 31 bp, Artificial Sequence
  Description of Artificial Sequence:  Nucleic Acid
  misc_feature: DNAzyme
gcgggacaggctagctacaacgatgcgtctt

SEQ ID NO: 12527 - DNA, 31 bp, Artificial Sequence
  Description of Artificial Sequence:  Nucleic Acid
  misc_feature: DNAzyme
gagcgggaggctagctacaacgaactgcgtc

SEQ ID NO: 12528 - DNA, 31 bp, Artificial Sequence
  Description of Artificial Sequence:  Nucleic Acid
  misc_feature: DNAzyme
tctgcgagggctagctacaacgagggacact

SEQ ID NO: 12529 - DNA, 31 bp, Artificial Sequence
  Description of Artificial Sequence:  Nucleic Acid
  misc_feature: DNAzyme
cgcctctgggctagctacaacgagagcggga

SEQ ID NO: 12530 - DNA, 31 bp, Artificial Sequence
  Description of Artificial Sequence:  Nucleic Acid
  misc_feature: DNAzyme
ctacctcgggctagctacaacgactctgcga

SEQ ID NO: 12531 - DNA, 31 bp, Artificial Sequence
  Description of Artificial Sequence:  Nucleic Acid
  misc_feature: DNAzyme
cggtcctaggctagctacaacgactcgcctc

SEQ ID NO: 12532 - DNA, 31 bp, Artificial Sequence
  Description of Artificial Sequence:  Nucleic Acid
  misc_feature: DNAzyme
cctaccggggctagctacaacgacctacctc

SEQ ID NO: 12533 - DNA, 31 bp, Artificial Sequence
  Description of Artificial Sequence:  Nucleic Acid
  misc_feature: DNAzyme
tgcccctaggctagctacaacgacggtccta

SEQ ID NO: 12534 - DNA, 31 bp, Artificial Sequence
  Description of Artificial Sequence:  Nucleic Acid
  misc_feature: DNAzyme
ctctcctgggctagctacaacgaccctaccg

SEQ ID NO: 12535 - DNA, 31 bp, Artificial Sequence
  Description of Artificial Sequence:  Nucleic Acid
  misc_feature: DNAzyme
tgtatatgggctagctacaacgactctcctg

SEQ ID NO: 12536 - DNA, 31 bp, Artificial Sequence
  Description of Artificial Sequence:  Nucleic Acid
  misc_feature: DNAzyme
cctgtataggctagctacaacgagcctctcc

SEQ ID NO: 12537 - DNA, 31 bp, Artificial Sequence
  Description of Artificial Sequence:  Nucleic Acid
  misc_feature: DNAzyme
aacctgtaggctagctacaacgaatgcctct

SEQ ID NO: 12538 - DNA, 31 bp, Artificial Sequence
  Description of Artificial Sequence:  Nucleic Acid
  misc_feature: DNAzyme
caaacctgggctagctacaacgaatatgcct

SEQ ID NO: 12539 - DNA, 31 bp, Artificial Sequence
  Description of Artificial Sequence:  Nucleic Acid
  misc_feature: DNAzyme
gtcacaaaggctagctacaacgactgtatat

SEQ ID NO: 12540 - DNA, 31 bp, Artificial Sequence
  Description of Artificial Sequence:  Nucleic Acid
  misc_feature: DNAzyme
tggagtcaggctagctacaacgaaaacctgt

SEQ ID NO: 12541 - DNA, 31 bp, Artificial Sequence
  Description of Artificial Sequence:  Nucleic Acid
  misc_feature: DNAzyme
tcctggagggctagctacaacgacacaaacc

SEQ ID NO: 12542 - DNA, 31 bp, Artificial Sequence
  Description of Artificial Sequence:  Nucleic Acid
  misc_feature: DNAzyme
gaaggccgggctagctacaacgatctcctgg

SEQ ID NO: 12543 - DNA, 31 bp, Artificial Sequence
  Description of Artificial Sequence:  Nucleic Acid
  misc_feature: DNAzyme
cccgaaggggctagctacaacgacgctctcc

SEQ ID NO: 12544 - DNA, 31 bp, Artificial Sequence
  Description of Artificial Sequence:  Nucleic Acid
  misc_feature: DNAzyme
cgaacatgggctagctacaacgaccgaaggc

SEQ ID NO: 12545 - DNA, 31 bp, Artificial Sequence
  Description of Artificial Sequence:  Nucleic Acid
  misc_feature: DNAzyme
gtcgaacaggctagctacaacgagcccgaag

SEQ ID NO: 12546 - DNA, 31 bp, Artificial Sequence
  Description of Artificial Sequence:  Nucleic Acid
  misc_feature: DNAzyme
gagtcgaaggctagctacaacgaatgcccga

SEQ ID NO: 12547 - DNA, 31 bp, Artificial Sequence
  Description of Artificial Sequence:  Nucleic Acid
  misc_feature: DNAzyme
ccgaggagggctagctacaacgacgaacatg

SEQ ID NO: 12548 - DNA, 31 bp, Artificial Sequence
  Description of Artificial Sequence:  Nucleic Acid
  misc_feature: DNAzyme
acacaggaggctagctacaacgacgaggagt

SEQ ID NO: 12549 - DNA, 31 bp, Artificial Sequence
  Description of Artificial Sequence:  Nucleic Acid
  misc_feature: DNAzyme
cactcacaggctagctacaacgaaggaccga

SEQ ID NO: 12550 - DNA, 31 bp, Artificial Sequence
  Description of Artificial Sequence:  Nucleic Acid
  misc_feature: DNAzyme
agcactcaggctagctacaacgaacaggacc

SEQ ID NO: 12551 - DNA, 31 bp, Artificial Sequence
  Description of Artificial Sequence:  Nucleic Acid
  misc_feature: DNAzyme
tcatagcaggctagctacaacgatcacacag

SEQ ID NO: 12552 - DNA, 31 bp, Artificial Sequence
  Description of Artificial Sequence:  Nucleic Acid
  misc_feature: DNAzyme
cgtcatagggctagctacaacgaactcacac

SEQ ID NO: 12553 - DNA, 31 bp, Artificial Sequence
  Description of Artificial Sequence:  Nucleic Acid
  misc_feature: DNAzyme
ccgcgtcaggctagctacaacgaagcactca

SEQ ID NO: 12554 - DNA, 31 bp, Artificial Sequence
  Description of Artificial Sequence:  Nucleic Acid
  misc_feature: DNAzyme
atcccgcgggctagctacaacgacatagcac

SEQ ID NO: 12555 - DNA, 31 bp, Artificial Sequence
  Description of Artificial Sequence:  Nucleic Acid
  misc_feature: DNAzyme
acatcccgggctagctacaacgagtcatagc

SEQ ID NO: 12556 - DNA, 31 bp, Artificial Sequence
  Description of Artificial Sequence:  Nucleic Acid
  misc_feature: DNAzyme
caagcacaggctagctacaacgacccgcgtc

SEQ ID NO: 12557 - DNA, 31 bp, Artificial Sequence
  Description of Artificial Sequence:  Nucleic Acid
  misc_feature: DNAzyme
accaagcaggctagctacaacgaatcccgcg

SEQ ID NO: 12558 - DNA, 31 bp, Artificial Sequence
  Description of Artificial Sequence:  Nucleic Acid
  misc_feature: DNAzyme
gtaccaagggctagctacaacgaacatcccg

SEQ ID NO: 12559 - DNA, 31 bp, Artificial Sequence
  Description of Artificial Sequence:  Nucleic Acid
  misc_feature: DNAzyme
agctcgtaggctagctacaacgacaagcaca

SEQ ID NO: 12560 - DNA, 31 bp, Artificial Sequence
  Description of Artificial Sequence:  Nucleic Acid
  misc_feature: DNAzyme
tgagctcgggctagctacaacgaaccaagca

SEQ ID NO: 12561 - DNA, 31 bp, Artificial Sequence
  Description of Artificial Sequence:  Nucleic Acid
  misc_feature: DNAzyme
ggcgtgagggctagctacaacgatcgtacca

SEQ ID NO: 12562 - DNA, 31 bp, Artificial Sequence
  Description of Artificial Sequence:  Nucleic Acid
  misc_feature: DNAzyme
ggcgggcgggctagctacaacgagagctcgt

SEQ ID NO: 12563 - DNA, 31 bp, Artificial Sequence
  Description of Artificial Sequence:  Nucleic Acid
  misc_feature: DNAzyme
tcggcgggggctagctacaacgagtgagctc

SEQ ID NO: 12564 - DNA, 31 bp, Artificial Sequence
  Description of Artificial Sequence:  Nucleic Acid
  misc_feature: DNAzyme
ggtctcggggctagctacaacgagggcgtga

SEQ ID NO: 12565 - DNA, 31 bp, Artificial Sequence
  Description of Artificial Sequence:  Nucleic Acid
  misc_feature: DNAzyme
aacggaggggctagctacaacgactcggcgg

SEQ ID NO: 12566 - DNA, 31 bp, Artificial Sequence
  Description of Artificial Sequence:  Nucleic Acid
  misc_feature: DNAzyme
caacctaaggctagctacaacgaggaggtct

SEQ ID NO: 12567 - DNA, 31 bp, Artificial Sequence
  Description of Artificial Sequence:  Nucleic Acid
  misc_feature: DNAzyme
gcccgcaaggctagctacaacgactaacgga

SEQ ID NO: 12568 - DNA, 31 bp, Artificial Sequence
  Description of Artificial Sequence:  Nucleic Acid
  misc_feature: DNAzyme
taagcccgggctagctacaacgaaacctaac

SEQ ID NO: 12569 - DNA, 31 bp, Artificial Sequence
  Description of Artificial Sequence:  Nucleic Acid
  misc_feature: DNAzyme
taggtaagggctagctacaacgaccgcaacc

SEQ ID NO: 12570 - DNA, 31 bp, Artificial Sequence
  Description of Artificial Sequence:  Nucleic Acid
  misc_feature: DNAzyme
tatttaggggctagctacaacgaaagcccgc

SEQ ID NO: 12571 - DNA, 31 bp, Artificial Sequence
  Description of Artificial Sequence:  Nucleic Acid
  misc_feature: DNAzyme
ctggtgtaggctagctacaacgattaggtaa

SEQ ID NO: 12572 - DNA, 31 bp, Artificial Sequence
  Description of Artificial Sequence:  Nucleic Acid
  misc_feature: DNAzyme
ccctggtgggctagctacaacgaatttaggt

SEQ ID NO: 12573 - DNA, 31 bp, Artificial Sequence
  Description of Artificial Sequence:  Nucleic Acid
  misc_feature: DNAzyme
aaccctggggctagctacaacgagtatttag

SEQ ID NO: 12574 - DNA, 31 bp, Artificial Sequence
  Description of Artificial Sequence:  Nucleic Acid
  misc_feature: DNAzyme
aagggcaaggctagctacaacgacctggtgt

SEQ ID NO: 12575 - DNA, 31 bp, Artificial Sequence
  Description of Artificial Sequence:  Nucleic Acid
  misc_feature: DNAzyme
cagaagggggctagctacaacgaaaccctgg

SEQ ID NO: 12576 - DNA, 31 bp, Artificial Sequence
  Description of Artificial Sequence:  Nucleic Acid
  misc_feature: DNAzyme
ggtcctggggctagctacaacgaagaagggc

SEQ ID NO: 12577 - DNA, 31 bp, Artificial Sequence
  Description of Artificial Sequence:  Nucleic Acid
  misc_feature: DNAzyme
ccagatggggctagctacaacgacctggcag

SEQ ID NO: 12578 - DNA, 31 bp, Artificial Sequence
  Description of Artificial Sequence:  Nucleic Acid
  misc_feature: DNAzyme
actccagaggctagctacaacgaggtcctgg

SEQ ID NO: 12579 - DNA, 31 bp, Artificial Sequence
  Description of Artificial Sequence:  Nucleic Acid
  misc_feature: DNAzyme
tcccagaaggctagctacaacgatccagatg

SEQ ID NO: 12580 - DNA, 31 bp, Artificial Sequence
  Description of Artificial Sequence:  Nucleic Acid
  misc_feature: DNAzyme
tgaagacaggctagctacaacgacctcccag

SEQ ID NO: 12581 - DNA, 31 bp, Artificial Sequence
  Description of Artificial Sequence:  Nucleic Acid
  misc_feature: DNAzyme
tgtgaagaggctagctacaacgaaccctccc

SEQ ID NO: 12582 - DNA, 31 bp, Artificial Sequence
  Description of Artificial Sequence:  Nucleic Acid
  misc_feature: DNAzyme
gaggcctgggctagctacaacgagaagacac

SEQ ID NO: 12583 - DNA, 31 bp, Artificial Sequence
  Description of Artificial Sequence:  Nucleic Acid
  misc_feature: DNAzyme
gggtgaggggctagctacaacgactgtgaag

SEQ ID NO: 12584 - DNA, 31 bp, Artificial Sequence
  Description of Artificial Sequence:  Nucleic Acid
  misc_feature: DNAzyme
tatgtgggggctagctacaacgagaggcctg

SEQ ID NO: 12585 - DNA, 31 bp, Artificial Sequence
  Description of Artificial Sequence:  Nucleic Acid
  misc_feature: DNAzyme
catctatgggctagctacaacgagggtgagg

SEQ ID NO: 12586 - DNA, 31 bp, Artificial Sequence
  Description of Artificial Sequence:  Nucleic Acid
  misc_feature: DNAzyme
ggcatctaggctagctacaacgagtgggtga

SEQ ID NO: 12587 - DNA, 31 bp, Artificial Sequence
  Description of Artificial Sequence:  Nucleic Acid
  misc_feature: DNAzyme
agtgggcaggctagctacaacgactatgtgg

SEQ ID NO: 12588 - DNA, 31 bp, Artificial Sequence
  Description of Artificial Sequence:  Nucleic Acid
  misc_feature: DNAzyme
gaagtgggggctagctacaacgaatctatgt

SEQ ID NO: 12589 - DNA, 31 bp, Artificial Sequence
  Description of Artificial Sequence:  Nucleic Acid
  misc_feature: DNAzyme
acaagaagggctagctacaacgagggcatct

SEQ ID NO: 12590 - DNA, 31 bp, Artificial Sequence
  Description of Artificial Sequence:  Nucleic Acid
  misc_feature: DNAzyme
gtctgggaggctagctacaacgaaagaagtg

SEQ ID NO: 12591 - DNA, 31 bp, Artificial Sequence
  Description of Artificial Sequence:  Nucleic Acid
  misc_feature: DNAzyme
ctgcttggggctagctacaacgactgggaca

SEQ ID NO: 12592 - DNA, 31 bp, Artificial Sequence
  Description of Artificial Sequence:  Nucleic Acid
  misc_feature: DNAzyme
cctgcctgggctagctacaacgattggtctg

SEQ ID NO: 12593 - DNA, 31 bp, Artificial Sequence
  Description of Artificial Sequence:  Nucleic Acid
  misc_feature: DNAzyme
ttctcctgggctagctacaacgactgcttgg

SEQ ID NO: 12594 - DNA, 31 bp, Artificial Sequence
  Description of Artificial Sequence:  Nucleic Acid
  misc_feature: DNAzyme
aggggaggggctagctacaacgatttctcct

SEQ ID NO: 12595 - DNA, 31 bp, Artificial Sequence
  Description of Artificial Sequence:  Nucleic Acid
  misc_feature: DNAzyme
ctaccaggggctagctacaacgaaggggagg

SEQ ID NO: 12596 - DNA, 31 bp, Artificial Sequence
  Description of Artificial Sequence:  Nucleic Acid
  misc_feature: DNAzyme
gtatgctaggctagctacaacgacaggtagg

SEQ ID NO: 12597 - DNA, 31 bp, Artificial Sequence
  Description of Artificial Sequence:  Nucleic Acid
  misc_feature: DNAzyme
ttggtatgggctagctacaacgataccaggt

SEQ ID NO: 12598 - DNA, 31 bp, Artificial Sequence
  Description of Artificial Sequence:  Nucleic Acid
  misc_feature: DNAzyme
gcttggtaggctagctacaacgagctaccag

SEQ ID NO: 12599 - DNA, 31 bp, Artificial Sequence
  Description of Artificial Sequence:  Nucleic Acid
  misc_feature: DNAzyme
tggcttggggctagctacaacgaatgctacc

SEQ ID NO: 12600 - DNA, 31 bp, Artificial Sequence
  Description of Artificial Sequence:  Nucleic Acid
  misc_feature: DNAzyme
cactgtggggctagctacaacgattggtatg

SEQ ID NO: 12601 - DNA, 31 bp, Artificial Sequence
  Description of Artificial Sequence:  Nucleic Acid
  misc_feature: DNAzyme
gcacactgggctagctacaacgaggcttggt

SEQ ID NO: 12602 - DNA, 31 bp, Artificial Sequence
  Description of Artificial Sequence:  Nucleic Acid
  misc_feature: DNAzyme
ggcgcacaggctagctacaacgatgtggctt

SEQ ID NO: 12603 - DNA, 31 bp, Artificial Sequence
  Description of Artificial Sequence:  Nucleic Acid
  misc_feature: DNAzyme
ctggcgcaggctagctacaacgaactgtggc

SEQ ID NO: 12604 - DNA, 31 bp, Artificial Sequence
  Description of Artificial Sequence:  Nucleic Acid
  misc_feature: DNAzyme
ccctggcgggctagctacaacgaacactgtg

SEQ ID NO: 12605 - DNA, 31 bp, Artificial Sequence
  Description of Artificial Sequence:  Nucleic Acid
  misc_feature: DNAzyme
agccctggggctagctacaacgagcacactg

SEQ ID NO: 12606 - DNA, 31 bp, Artificial Sequence
  Description of Artificial Sequence:  Nucleic Acid
  misc_feature: DNAzyme
agcctgagggctagctacaacgacctggcgc

SEQ ID NO: 12607 - DNA, 31 bp, Artificial Sequence
  Description of Artificial Sequence:  Nucleic Acid
  misc_feature: DNAzyme
gggtggagggctagctacaacgactgagccc

SEQ ID NO: 12608 - DNA, 31 bp, Artificial Sequence
  Description of Artificial Sequence:  Nucleic Acid
  misc_feature: DNAzyme
gatgggggggctagctacaacgaggagcctg

SEQ ID NO: 12609 - DNA, 31 bp, Artificial Sequence
  Description of Artificial Sequence:  Nucleic Acid
  misc_feature: DNAzyme
tcccacgaggctagctacaacgagggggtgg

SEQ ID NO: 12610 - DNA, 31 bp, Artificial Sequence
  Description of Artificial Sequence:  Nucleic Acid
  misc_feature: DNAzyme
tgatcccaggctagctacaacgagatggggg

SEQ ID NO: 12611 - DNA, 31 bp, Artificial Sequence
  Description of Artificial Sequence:  Nucleic Acid
  misc_feature: DNAzyme
acatttgaggctagctacaacgacccacgat

SEQ ID NO: 12612 - DNA, 31 bp, Artificial Sequence
  Description of Artificial Sequence:  Nucleic Acid
  misc_feature: DNAzyme
cttccacaggctagctacaacgattgatccc

SEQ ID NO: 12613 - DNA, 31 bp, Artificial Sequence
  Description of Artificial Sequence:  Nucleic Acid
  misc_feature: DNAzyme
cacttccaggctagctacaacgaatttgatc

SEQ ID NO: 12614 - DNA, 31 bp, Artificial Sequence
  Description of Artificial Sequence:  Nucleic Acid
  misc_feature: DNAzyme
gtgagacaggctagctacaacgattccacat

SEQ ID NO: 12615 - DNA, 31 bp, Artificial Sequence
  Description of Artificial Sequence:  Nucleic Acid
  misc_feature: DNAzyme
gtgtgagaggctagctacaacgaacttccac

SEQ ID NO: 12616 - DNA, 31 bp, Artificial Sequence
  Description of Artificial Sequence:  Nucleic Acid
  misc_feature: DNAzyme
tagccgtgggctagctacaacgagagacact

SEQ ID NO: 12617 - DNA, 31 bp, Artificial Sequence
  Description of Artificial Sequence:  Nucleic Acid
  misc_feature: DNAzyme
tttagccgggctagctacaacgagtgagaca

SEQ ID NO: 12618 - DNA, 31 bp, Artificial Sequence
  Description of Artificial Sequence:  Nucleic Acid
  misc_feature: DNAzyme
ggctttagggctagctacaacgacgtgtgag

SEQ ID NO: 12619 - DNA, 31 bp, Artificial Sequence
  Description of Artificial Sequence:  Nucleic Acid
  misc_feature: DNAzyme
agcgtaggggctagctacaacgatttagccg

SEQ ID NO: 12620 - DNA, 31 bp, Artificial Sequence
  Description of Artificial Sequence:  Nucleic Acid
  misc_feature: DNAzyme
gtgtagcgggctagctacaacgaaggcttta

SEQ ID NO: 12621 - DNA, 31 bp, Artificial Sequence
  Description of Artificial Sequence:  Nucleic Acid
  misc_feature: DNAzyme
ccgtgtagggctagctacaacgagtaggctt

SEQ ID NO: 12622 - DNA, 31 bp, Artificial Sequence
  Description of Artificial Sequence:  Nucleic Acid
  misc_feature: DNAzyme
ggcccgtgggctagctacaacgaagcgtagg

SEQ ID NO: 12623 - DNA, 31 bp, Artificial Sequence
  Description of Artificial Sequence:  Nucleic Acid
  misc_feature: DNAzyme
ttggcccgggctagctacaacgagtagcgta

SEQ ID NO: 12624 - DNA, 31 bp, Artificial Sequence
  Description of Artificial Sequence:  Nucleic Acid
  misc_feature: DNAzyme
ggtgttggggctagctacaacgaccgtgtag

SEQ ID NO: 12625 - DNA, 31 bp, Artificial Sequence
  Description of Artificial Sequence:  Nucleic Acid
  misc_feature: DNAzyme
caggggtgggctagctacaacgatggcccgt

SEQ ID NO: 12626 - DNA, 31 bp, Artificial Sequence
  Description of Artificial Sequence:  Nucleic Acid
  misc_feature: DNAzyme
agcaggggggctagctacaacgagttggccc

SEQ ID NO: 12627 - DNA, 31 bp, Artificial Sequence
  Description of Artificial Sequence:  Nucleic Acid
  misc_feature: DNAzyme
ctatacagggctagctacaacgaaggggtgt

SEQ ID NO: 12628 - DNA, 31 bp, Artificial Sequence
  Description of Artificial Sequence:  Nucleic Acid
  misc_feature: DNAzyme
agcctataggctagctacaacgaagcagggg

SEQ ID NO: 12629 - DNA, 31 bp, Artificial Sequence
  Description of Artificial Sequence:  Nucleic Acid
  misc_feature: DNAzyme
ctagcctaggctagctacaacgaacagcagg

SEQ ID NO: 12630 - DNA, 31 bp, Artificial Sequence
  Description of Artificial Sequence:  Nucleic Acid
  misc_feature: DNAzyme
gctcctagggctagctacaacgactatacag

SEQ ID NO: 12631 - DNA, 31 bp, Artificial Sequence
  Description of Artificial Sequence:  Nucleic Acid
  misc_feature: DNAzyme
ttggacggggctagctacaacgatcctagcc

SEQ ID NO: 12632 - DNA, 31 bp, Artificial Sequence
  Description of Artificial Sequence:  Nucleic Acid
  misc_feature: DNAzyme
attttggaggctagctacaacgaggctccta

SEQ ID NO: 12633 - DNA, 31 bp, Artificial Sequence
  Description of Artificial Sequence:  Nucleic Acid
  misc_feature: DNAzyme
tgacatcaggctagctacaacgatttggacg

SEQ ID NO: 12634 - DNA, 31 bp, Artificial Sequence
  Description of Artificial Sequence:  Nucleic Acid
  misc_feature: DNAzyme
gggtgacaggctagctacaacgacattttgg

SEQ ID NO: 12635 - DNA, 31 bp, Artificial Sequence
  Description of Artificial Sequence:  Nucleic Acid
  misc_feature: DNAzyme
gagggtgaggctagctacaacgaatcatttt

SEQ ID NO: 12636 - DNA, 31 bp, Artificial Sequence
  Description of Artificial Sequence:  Nucleic Acid
  misc_feature: DNAzyme
tgtgagggggctagctacaacgagacatcat

SEQ ID NO: 12637 - DNA, 31 bp, Artificial Sequence
  Description of Artificial Sequence:  Nucleic Acid
  misc_feature: DNAzyme
ggggtgtgggctagctacaacgagagggtga

SEQ ID NO: 12638 - DNA, 31 bp, Artificial Sequence
  Description of Artificial Sequence:  Nucleic Acid
  misc_feature: DNAzyme
atggggtgggctagctacaacgagtgagggt

SEQ ID NO: 12639 - DNA, 31 bp, Artificial Sequence
  Description of Artificial Sequence:  Nucleic Acid
  misc_feature: DNAzyme
ttatggggggctagctacaacgagtgtgagg

SEQ ID NO: 12640 - DNA, 31 bp, Artificial Sequence
  Description of Artificial Sequence:  Nucleic Acid
  misc_feature: DNAzyme
tttggttaggctagctacaacgaggggtgtg

SEQ ID NO: 12641 - DNA, 31 bp, Artificial Sequence
  Description of Artificial Sequence:  Nucleic Acid
  misc_feature: DNAzyme
gtatttggggctagctacaacgatatggggt

SEQ ID NO: 12642 - DNA, 31 bp, Artificial Sequence
  Description of Artificial Sequence:  Nucleic Acid
  misc_feature: DNAzyme
atgatgtaggctagctacaacgattggttat

SEQ ID NO: 12643 - DNA, 31 bp, Artificial Sequence
  Description of Artificial Sequence:  Nucleic Acid
  misc_feature: DNAzyme
tcatgatgggctagctacaacgaatttggtt

SEQ ID NO: 12644 - DNA, 31 bp, Artificial Sequence
  Description of Artificial Sequence:  Nucleic Acid
  misc_feature: DNAzyme
tgtcatgaggctagctacaacgagtatttgg

SEQ ID NO: 12645 - DNA, 31 bp, Artificial Sequence
  Description of Artificial Sequence:  Nucleic Acid
  misc_feature: DNAzyme
gcatgtcaggctagctacaacgagatgtatt

SEQ ID NO: 12646 - DNA, 31 bp, Artificial Sequence
  Description of Artificial Sequence:  Nucleic Acid
  misc_feature: DNAzyme
catgcatgggctagctacaacgacatgatgt

SEQ ID NO: 12647 - DNA, 31 bp, Artificial Sequence
  Description of Artificial Sequence:  Nucleic Acid
  misc_feature: DNAzyme
gacatgcaggctagctacaacgagtcatgat

SEQ ID NO: 12648 - DNA, 31 bp, Artificial Sequence
  Description of Artificial Sequence:  Nucleic Acid
  misc_feature: DNAzyme
ccgacatgggctagctacaacgaatgtcatg

SEQ ID NO: 12649 - DNA, 31 bp, Artificial Sequence
  Description of Artificial Sequence:  Nucleic Acid
  misc_feature: DNAzyme
agccgacaggctagctacaacgagcatgtca

SEQ ID NO: 12650 - DNA, 31 bp, Artificial Sequence
  Description of Artificial Sequence:  Nucleic Acid
  misc_feature: DNAzyme
tcagccgaggctagctacaacgaatgcatgt

SEQ ID NO: 12651 - DNA, 31 bp, Artificial Sequence
  Description of Artificial Sequence:  Nucleic Acid
  misc_feature: DNAzyme
caggtcagggctagctacaacgacgacatgc

SEQ ID NO: 12652 - DNA, 31 bp, Artificial Sequence
  Description of Artificial Sequence:  Nucleic Acid
  misc_feature: DNAzyme
cctccaggggctagctacaacgacagccgac

SEQ ID NO: 12653 - DNA, 31 bp, Artificial Sequence
  Description of Artificial Sequence:  Nucleic Acid
  misc_feature: DNAzyme
ggtgacgaggctagctacaacgactccaggt

SEQ ID NO: 12654 - DNA, 31 bp, Artificial Sequence
  Description of Artificial Sequence:  Nucleic Acid
  misc_feature: DNAzyme
gctggtgaggctagctacaacgagacctcca

SEQ ID NO: 12655 - DNA, 31 bp, Artificial Sequence
  Description of Artificial Sequence:  Nucleic Acid
  misc_feature: DNAzyme
ggtgctggggctagctacaacgagacgacct

SEQ ID NO: 12656 - DNA, 31 bp, Artificial Sequence
  Description of Artificial Sequence:  Nucleic Acid
  misc_feature: DNAzyme
cccaggtgggctagctacaacgatggtgacg

SEQ ID NO: 12657 - DNA, 31 bp, Artificial Sequence
  Description of Artificial Sequence:  Nucleic Acid
  misc_feature: DNAzyme
cacccaggggctagctacaacgagctggtga

SEQ ID NO: 12658 - DNA, 31 bp, Artificial Sequence
  Description of Artificial Sequence:  Nucleic Acid
  misc_feature: DNAzyme
tactagcaggctagctacaacgaccaggtgc

SEQ ID NO: 12659 - DNA, 31 bp, Artificial Sequence
  Description of Artificial Sequence:  Nucleic Acid
  misc_feature: DNAzyme
cctactagggctagctacaacgaacccaggt

SEQ ID NO: 12660 - DNA, 31 bp, Artificial Sequence
  Description of Artificial Sequence:  Nucleic Acid
  misc_feature: DNAzyme
gccacctaggctagctacaacgatagcaccc

SEQ ID NO: 12661 - DNA, 31 bp, Artificial Sequence
  Description of Artificial Sequence:  Nucleic Acid
  misc_feature: DNAzyme
ggacgccaggctagctacaacgactactagc

SEQ ID NO: 12662 - DNA, 31 bp, Artificial Sequence
  Description of Artificial Sequence:  Nucleic Acid
  misc_feature: DNAzyme
ccaggacgggctagctacaacgacacctact

SEQ ID NO: 12663 - DNA, 31 bp, Artificial Sequence
  Description of Artificial Sequence:  Nucleic Acid
  misc_feature: DNAzyme
tgccaggaggctagctacaacgagccaccta

SEQ ID NO: 12664 - DNA, 31 bp, Artificial Sequence
  Description of Artificial Sequence:  Nucleic Acid
  misc_feature: DNAzyme
cagagctgggctagctacaacgacaggacgc

SEQ ID NO: 12665 - DNA, 31 bp, Artificial Sequence
  Description of Artificial Sequence:  Nucleic Acid
  misc_feature: DNAzyme
ggtcagagggctagctacaacgatgccagga

SEQ ID NO: 12666 - DNA, 31 bp, Artificial Sequence
  Description of Artificial Sequence:  Nucleic Acid
  misc_feature: DNAzyme
atacgcggggctagctacaacgacagagctg

SEQ ID NO: 12667 - DNA, 31 bp, Artificial Sequence
  Description of Artificial Sequence:  Nucleic Acid
  misc_feature: DNAzyme
gcaatacgggctagctacaacgaggtcagag

SEQ ID NO: 12668 - DNA, 31 bp, Artificial Sequence
  Description of Artificial Sequence:  Nucleic Acid
  misc_feature: DNAzyme
aggcaataggctagctacaacgagcggtcag

SEQ ID NO: 12669 - DNA, 31 bp, Artificial Sequence
  Description of Artificial Sequence:  Nucleic Acid
  misc_feature: DNAzyme
tcaggcaaggctagctacaacgaacgcggtc

SEQ ID NO: 12670 - DNA, 31 bp, Artificial Sequence
  Description of Artificial Sequence:  Nucleic Acid
  misc_feature: DNAzyme
tcgtcaggggctagctacaacgaaatacgcg

SEQ ID NO: 12671 - DNA, 31 bp, Artificial Sequence
  Description of Artificial Sequence:  Nucleic Acid
  misc_feature: DNAzyme
gcctgtcgggctagctacaacgacaggcaat

SEQ ID NO: 12672 - DNA, 31 bp, Artificial Sequence
  Description of Artificial Sequence:  Nucleic Acid
  misc_feature: DNAzyme
gctgcctgggctagctacaacgacgtcaggc

SEQ ID NO: 12673 - DNA, 31 bp, Artificial Sequence
  Description of Artificial Sequence:  Nucleic Acid
  misc_feature: DNAzyme
ccacgctgggctagctacaacgactgtcgtc

SEQ ID NO: 12674 - DNA, 31 bp, Artificial Sequence
  Description of Artificial Sequence:  Nucleic Acid
  misc_feature: DNAzyme
tgaccacgggctagctacaacgatgcctgtc

SEQ ID NO: 12675 - DNA, 31 bp, Artificial Sequence
  Description of Artificial Sequence:  Nucleic Acid
  misc_feature: DNAzyme
aatgaccaggctagctacaacgagctgcctg

SEQ ID NO: 12676 - DNA, 31 bp, Artificial Sequence
  Description of Artificial Sequence:  Nucleic Acid
  misc_feature: DNAzyme
cacaatgaggctagctacaacgacacgctgc

SEQ ID NO: 12677 - DNA, 31 bp, Artificial Sequence
  Description of Artificial Sequence:  Nucleic Acid
  misc_feature: DNAzyme
gcccacaaggctagctacaacgagaccacgc

SEQ ID NO: 12678 - DNA, 31 bp, Artificial Sequence
  Description of Artificial Sequence:  Nucleic Acid
  misc_feature: DNAzyme
tctgcccaggctagctacaacgaaatgacca

SEQ ID NO: 12679 - DNA, 31 bp, Artificial Sequence
  Description of Artificial Sequence:  Nucleic Acid
  misc_feature: DNAzyme
tgattctgggctagctacaacgaccacaatg

SEQ ID NO: 12680 - DNA, 31 bp, Artificial Sequence
  Description of Artificial Sequence:  Nucleic Acid
  misc_feature: DNAzyme
caagatgaggctagctacaacgatctgccca

SEQ ID NO: 12681 - DNA, 31 bp, Artificial Sequence
  Description of Artificial Sequence:  Nucleic Acid
  misc_feature: DNAzyme
ggacaagaggctagctacaacgagattctgc

SEQ ID NO: 12682 - DNA, 31 bp, Artificial Sequence
  Description of Artificial Sequence:  Nucleic Acid
  misc_feature: DNAzyme
ttcccggaggctagctacaacgaaagatgat

SEQ ID NO: 12683 - DNA, 31 bp, Artificial Sequence
  Description of Artificial Sequence:  Nucleic Acid
  misc_feature: DNAzyme
acagccggggctagctacaacgattcccgga

SEQ ID NO: 12684 - DNA, 31 bp, Artificial Sequence
  Description of Artificial Sequence:  Nucleic Acid
  misc_feature: DNAzyme
gataacagggctagctacaacgacggcttcc

SEQ ID NO: 12685 - DNA, 31 bp, Artificial Sequence
  Description of Artificial Sequence:  Nucleic Acid
  misc_feature: DNAzyme
ggggataaggctagctacaacgaagccggct

SEQ ID NO: 12686 - DNA, 31 bp, Artificial Sequence
  Description of Artificial Sequence:  Nucleic Acid
  misc_feature: DNAzyme
gtcggggaggctagctacaacgaaacagccg

SEQ ID NO: 12687 - DNA, 31 bp, Artificial Sequence
  Description of Artificial Sequence:  Nucleic Acid
  misc_feature: DNAzyme
cctccctgggctagctacaacgacggggata

SEQ ID NO: 12688 - DNA, 31 bp, Artificial Sequence
  Description of Artificial Sequence:  Nucleic Acid
  misc_feature: DNAzyme
gtagagagggctagctacaacgactccctgt

SEQ ID NO: 12689 - DNA, 31 bp, Artificial Sequence
  Description of Artificial Sequence:  Nucleic Acid
  misc_feature: DNAzyme
actcctggggctagctacaacgaagagagcc

SEQ ID NO: 12690 - DNA, 31 bp, Artificial Sequence
  Description of Artificial Sequence:  Nucleic Acid
  misc_feature: DNAzyme
tcatcgaaggctagctacaacgatcctggta

SEQ ID NO: 12691 - DNA, 31 bp, Artificial Sequence
  Description of Artificial Sequence:  Nucleic Acid
  misc_feature: DNAzyme
ccatctcaggctagctacaacgacgaactcc

SEQ ID NO: 12692 - DNA, 31 bp, Artificial Sequence
  Description of Artificial Sequence:  Nucleic Acid
  misc_feature: DNAzyme
ctcctccaggctagctacaacgactcatcga

SEQ ID NO: 12693 - DNA, 31 bp, Artificial Sequence
  Description of Artificial Sequence:  Nucleic Acid
  misc_feature: DNAzyme
gaggcacaggctagctacaacgatcctccat

SEQ ID NO: 12694 - DNA, 31 bp, Artificial Sequence
  Description of Artificial Sequence:  Nucleic Acid
  misc_feature: DNAzyme
gtgaggcaggctagctacaacgaactcctcc

SEQ ID NO: 12695 - DNA, 31 bp, Artificial Sequence
  Description of Artificial Sequence:  Nucleic Acid
  misc_feature: DNAzyme
gtgtgaggggctagctacaacgaacactcct

SEQ ID NO: 12696 - DNA, 31 bp, Artificial Sequence
  Description of Artificial Sequence:  Nucleic Acid
  misc_feature: DNAzyme
gggaggtgggctagctacaacgagaggcaca

SEQ ID NO: 12697 - DNA, 31 bp, Artificial Sequence
  Description of Artificial Sequence:  Nucleic Acid
  misc_feature: DNAzyme
aagggaggggctagctacaacgagtgaggca

SEQ ID NO: 12698 - DNA, 31 bp, Artificial Sequence
  Description of Artificial Sequence:  Nucleic Acid
  misc_feature: DNAzyme
gttcgatgggctagctacaacgaaagggagg

SEQ ID NO: 12699 - DNA, 31 bp, Artificial Sequence
  Description of Artificial Sequence:  Nucleic Acid
  misc_feature: DNAzyme
ctgttcgaggctagctacaacgagtaaggga

SEQ ID NO: 12700 - DNA, 31 bp, Artificial Sequence
  Description of Artificial Sequence:  Nucleic Acid
  misc_feature: DNAzyme
atcccctgggctagctacaacgatcgatgta

SEQ ID NO: 12701 - DNA, 31 bp, Artificial Sequence
  Description of Artificial Sequence:  Nucleic Acid
  misc_feature: DNAzyme
gagctgcaggctagctacaacgacccctgtt

SEQ ID NO: 12702 - DNA, 31 bp, Artificial Sequence
  Description of Artificial Sequence:  Nucleic Acid
  misc_feature: DNAzyme
gcgagctgggctagctacaacgaatcccctg

SEQ ID NO: 12703 - DNA, 31 bp, Artificial Sequence
  Description of Artificial Sequence:  Nucleic Acid
  misc_feature: DNAzyme
tcggcgagggctagctacaacgatgcatccc

SEQ ID NO: 12704 - DNA, 31 bp, Artificial Sequence
  Description of Artificial Sequence:  Nucleic Acid
  misc_feature: DNAzyme
ctgctcggggctagctacaacgagagctgca

SEQ ID NO: 12705 - DNA, 31 bp, Artificial Sequence
  Description of Artificial Sequence:  Nucleic Acid
  misc_feature: DNAzyme
ttgaactgggctagctacaacgatcggcgag

SEQ ID NO: 12706 - DNA, 31 bp, Artificial Sequence
  Description of Artificial Sequence:  Nucleic Acid
  misc_feature: DNAzyme
tgcttgaaggctagctacaacgatgctcggc

SEQ ID NO: 12707 - DNA, 31 bp, Artificial Sequence
  Description of Artificial Sequence:  Nucleic Acid
  misc_feature: DNAzyme
gccttctgggctagctacaacgattgaactg

SEQ ID NO: 12708 - DNA, 31 bp, Artificial Sequence
  Description of Artificial Sequence:  Nucleic Acid
  misc_feature: DNAzyme
tccgagcgggctagctacaacgacttctgct

SEQ ID NO: 12709 - DNA, 31 bp, Artificial Sequence
  Description of Artificial Sequence:  Nucleic Acid
  misc_feature: DNAzyme
aatccgagggctagctacaacgagccttctg

SEQ ID NO: 12710 - DNA, 31 bp, Artificial Sequence
  Description of Artificial Sequence:  Nucleic Acid
  misc_feature: DNAzyme
tgcagcaaggctagctacaacgaccgagcgc

SEQ ID NO: 12711 - DNA, 31 bp, Artificial Sequence
  Description of Artificial Sequence:  Nucleic Acid
  misc_feature: DNAzyme
gtttgcagggctagctacaacgaaatccgag

SEQ ID NO: 12712 - DNA, 31 bp, Artificial Sequence
  Description of Artificial Sequence:  Nucleic Acid
  misc_feature: DNAzyme
gctgtttgggctagctacaacgaagcaatcc

SEQ ID NO: 12713 - DNA, 31 bp, Artificial Sequence
  Description of Artificial Sequence:  Nucleic Acid
  misc_feature: DNAzyme
ggtggctgggctagctacaacgattgcagca

SEQ ID NO: 12714 - DNA, 31 bp, Artificial Sequence
  Description of Artificial Sequence:  Nucleic Acid
  misc_feature: DNAzyme
gttggtggggctagctacaacgatgtttgca

SEQ ID NO: 12715 - DNA, 31 bp, Artificial Sequence
  Description of Artificial Sequence:  Nucleic Acid
  misc_feature: DNAzyme
ttggttggggctagctacaacgaggctgttt

SEQ ID NO: 12716 - DNA, 31 bp, Artificial Sequence
  Description of Artificial Sequence:  Nucleic Acid
  misc_feature: DNAzyme
ccgcttggggctagctacaacgatggtggct

SEQ ID NO: 12717 - DNA, 31 bp, Artificial Sequence
  Description of Artificial Sequence:  Nucleic Acid
  misc_feature: DNAzyme
agcctccgggctagctacaacgattggttgg

SEQ ID NO: 12718 - DNA, 31 bp, Artificial Sequence
  Description of Artificial Sequence:  Nucleic Acid
  misc_feature: DNAzyme
agcagcagggctagctacaacgactccgctt

SEQ ID NO: 12719 - DNA, 31 bp, Artificial Sequence
  Description of Artificial Sequence:  Nucleic Acid
  misc_feature: DNAzyme
gggagcagggctagctacaacgaagcctccg

SEQ ID NO: 12720 - DNA, 31 bp, Artificial Sequence
  Description of Artificial Sequence:  Nucleic Acid
  misc_feature: DNAzyme
cacgggagggctagctacaacgaagcagcct

SEQ ID NO: 12721 - DNA, 31 bp, Artificial Sequence
  Description of Artificial Sequence:  Nucleic Acid
  misc_feature: DNAzyme
ttccaccaggctagctacaacgagggagcag

SEQ ID NO: 12722 - DNA, 31 bp, Artificial Sequence
  Description of Artificial Sequence:  Nucleic Acid
  misc_feature: DNAzyme
ggattccaggctagctacaacgacacgggag

SEQ ID NO: 12723 - DNA, 31 bp, Artificial Sequence
  Description of Artificial Sequence:  Nucleic Acid
  misc_feature: DNAzyme
cacttggaggctagctacaacgatccaccac

SEQ ID NO: 12724 - DNA, 31 bp, Artificial Sequence
  Description of Artificial Sequence:  Nucleic Acid
  misc_feature: DNAzyme
gctcgccaggctagctacaacgattggattc

SEQ ID NO: 12725 - DNA, 31 bp, Artificial Sequence
  Description of Artificial Sequence:  Nucleic Acid
  misc_feature: DNAzyme
agggctcgggctagctacaacgacacttgga

SEQ ID NO: 12726 - DNA, 31 bp, Artificial Sequence
  Description of Artificial Sequence:  Nucleic Acid
  misc_feature: DNAzyme
ctcaagggggctagctacaacgatcgccact

SEQ ID NO: 12727 - DNA, 31 bp, Artificial Sequence
  Description of Artificial Sequence:  Nucleic Acid
  misc_feature: DNAzyme
ccagaaagggctagctacaacgactcaaggg

SEQ ID NO: 12728 - DNA, 31 bp, Artificial Sequence
  Description of Artificial Sequence:  Nucleic Acid
  misc_feature: DNAzyme
gtgcttcgggctagctacaacgaccagaaag

SEQ ID NO: 12729 - DNA, 31 bp, Artificial Sequence
  Description of Artificial Sequence:  Nucleic Acid
  misc_feature: DNAzyme
cacatgtgggctagctacaacgattcgccca

SEQ ID NO: 12730 - DNA, 31 bp, Artificial Sequence
  Description of Artificial Sequence:  Nucleic Acid
  misc_feature: DNAzyme
tccacatgggctagctacaacgagcttcgcc

SEQ ID NO: 12731 - DNA, 31 bp, Artificial Sequence
  Description of Artificial Sequence:  Nucleic Acid
  misc_feature: DNAzyme
attccacaggctagctacaacgagtgcttcg

SEQ ID NO: 12732 - DNA, 31 bp, Artificial Sequence
  Description of Artificial Sequence:  Nucleic Acid
  misc_feature: DNAzyme
aaattccaggctagctacaacgaatgtgctt

SEQ ID NO: 12733 - DNA, 31 bp, Artificial Sequence
  Description of Artificial Sequence:  Nucleic Acid
  misc_feature: DNAzyme
tgatgaaaggctagctacaacgatccacatg

SEQ ID NO: 12734 - DNA, 31 bp, Artificial Sequence
  Description of Artificial Sequence:  Nucleic Acid
  misc_feature: DNAzyme
cccgctgaggctagctacaacgagaaattcc

SEQ ID NO: 12735 - DNA, 31 bp, Artificial Sequence
  Description of Artificial Sequence:  Nucleic Acid
  misc_feature: DNAzyme
gtatcccgggctagctacaacgatgatgaaa

SEQ ID NO: 12736 - DNA, 31 bp, Artificial Sequence
  Description of Artificial Sequence:  Nucleic Acid
  misc_feature: DNAzyme
gtactgtaggctagctacaacgacccgctga

SEQ ID NO: 12737 - DNA, 31 bp, Artificial Sequence
  Description of Artificial Sequence:  Nucleic Acid
  misc_feature: DNAzyme
aggtactgggctagctacaacgaatcccgct

SEQ ID NO: 12738 - DNA, 31 bp, Artificial Sequence
  Description of Artificial Sequence:  Nucleic Acid
  misc_feature: DNAzyme
gctaggtaggctagctacaacgatgtatccc

SEQ ID NO: 12739 - DNA, 31 bp, Artificial Sequence
  Description of Artificial Sequence:  Nucleic Acid
  misc_feature: DNAzyme
ctgctaggggctagctacaacgaactgtatc

SEQ ID NO: 12740 - DNA, 31 bp, Artificial Sequence
  Description of Artificial Sequence:  Nucleic Acid
  misc_feature: DNAzyme
caagcctgggctagctacaacgataggtact

SEQ ID NO: 12741 - DNA, 31 bp, Artificial Sequence
  Description of Artificial Sequence:  Nucleic Acid
  misc_feature: DNAzyme
tggacaagggctagctacaacgactgctagg

SEQ ID NO: 12742 - DNA, 31 bp, Artificial Sequence
  Description of Artificial Sequence:  Nucleic Acid
  misc_feature: DNAzyme
agagtggaggctagctacaacgaaagcctgc

SEQ ID NO: 12743 - DNA, 31 bp, Artificial Sequence
  Description of Artificial Sequence:  Nucleic Acid
  misc_feature: DNAzyme
aggcagagggctagctacaacgaggacaagc

SEQ ID NO: 12744 - DNA, 31 bp, Artificial Sequence
  Description of Artificial Sequence:  Nucleic Acid
  misc_feature: DNAzyme
ttcccaggggctagctacaacgaagagtgga

SEQ ID NO: 12745 - DNA, 31 bp, Artificial Sequence
  Description of Artificial Sequence:  Nucleic Acid
  misc_feature: DNAzyme
tcgcggggggctagctacaacgatcccaggc

SEQ ID NO: 12746 - DNA, 31 bp, Artificial Sequence
  Description of Artificial Sequence:  Nucleic Acid
  misc_feature: DNAzyme
tgctatcgggctagctacaacgaggggttcc

SEQ ID NO: 12747 - DNA, 31 bp, Artificial Sequence
  Description of Artificial Sequence:  Nucleic Acid
  misc_feature: DNAzyme
tgatgctaggctagctacaacgacgcggggt

SEQ ID NO: 12748 - DNA, 31 bp, Artificial Sequence
  Description of Artificial Sequence:  Nucleic Acid
  misc_feature: DNAzyme
caatgatgggctagctacaacgatatcgcgg

SEQ ID NO: 12749 - DNA, 31 bp, Artificial Sequence
  Description of Artificial Sequence:  Nucleic Acid
  misc_feature: DNAzyme
atcaatgaggctagctacaacgagctatcgc

SEQ ID NO: 12750 - DNA, 31 bp, Artificial Sequence
  Description of Artificial Sequence:  Nucleic Acid
  misc_feature: DNAzyme
gccatcaaggctagctacaacgagatgctat

SEQ ID NO: 12751 - DNA, 31 bp, Artificial Sequence
  Description of Artificial Sequence:  Nucleic Acid
  misc_feature: DNAzyme
gaatgccaggctagctacaacgacaatgatg

SEQ ID NO: 12752 - DNA, 31 bp, Artificial Sequence
  Description of Artificial Sequence:  Nucleic Acid
  misc_feature: DNAzyme
tgtgaatgggctagctacaacgacatcaatg

SEQ ID NO: 12753 - DNA, 31 bp, Artificial Sequence
  Description of Artificial Sequence:  Nucleic Acid
  misc_feature: DNAzyme
gctgtgaaggctagctacaacgagccatcaa

SEQ ID NO: 12754 - DNA, 31 bp, Artificial Sequence
  Description of Artificial Sequence:  Nucleic Acid
  misc_feature: DNAzyme
ggaggctgggctagctacaacgagaatgcca

SEQ ID NO: 12755 - DNA, 31 bp, Artificial Sequence
  Description of Artificial Sequence:  Nucleic Acid
  misc_feature: DNAzyme
gatggaggggctagctacaacgatgtgaatg

SEQ ID NO: 12756 - DNA, 31 bp, Artificial Sequence
  Description of Artificial Sequence:  Nucleic Acid
  misc_feature: DNAzyme
gctggtgaggctagctacaacgaggaggctg

SEQ ID NO: 12757 - DNA, 31 bp, Artificial Sequence
  Description of Artificial Sequence:  Nucleic Acid
  misc_feature: DNAzyme
cgggctggggctagctacaacgagatggagg

SEQ ID NO: 12758 - DNA, 31 bp, Artificial Sequence
  Description of Artificial Sequence:  Nucleic Acid
  misc_feature: DNAzyme
tgagcgggggctagctacaacgatggtgatg

SEQ ID NO: 12759 - DNA, 31 bp, Artificial Sequence
  Description of Artificial Sequence:  Nucleic Acid
  misc_feature: DNAzyme
gtggtgagggctagctacaacgagggctggt

SEQ ID NO: 12760 - DNA, 31 bp, Artificial Sequence
  Description of Artificial Sequence:  Nucleic Acid
  misc_feature: DNAzyme
ttgggtggggctagctacaacgagagcgggc

SEQ ID NO: 12761 - DNA, 31 bp, Artificial Sequence
  Description of Artificial Sequence:  Nucleic Acid
  misc_feature: DNAzyme
gctttgggggctagctacaacgaggtgagcg

SEQ ID NO: 12762 - DNA, 31 bp, Artificial Sequence
  Description of Artificial Sequence:  Nucleic Acid
  misc_feature: DNAzyme
ggagggtgggctagctacaacgatttgggtg

SEQ ID NO: 12763 - DNA, 31 bp, Artificial Sequence
  Description of Artificial Sequence:  Nucleic Acid
  misc_feature: DNAzyme
caggagggggctagctacaacgagctttggg

SEQ ID NO: 12764 - DNA, 31 bp, Artificial Sequence
  Description of Artificial Sequence:  Nucleic Acid
  misc_feature: DNAzyme
atgttgaaggctagctacaacgaaggagggt

SEQ ID NO: 12765 - DNA, 31 bp, Artificial Sequence
  Description of Artificial Sequence:  Nucleic Acid
  misc_feature: DNAzyme
ccaagatgggctagctacaacgatgaacagg

SEQ ID NO: 12766 - DNA, 31 bp, Artificial Sequence
  Description of Artificial Sequence:  Nucleic Acid
  misc_feature: DNAzyme
tcccaagaggctagctacaacgagttgaaca

SEQ ID NO: 12767 - DNA, 31 bp, Artificial Sequence
  Description of Artificial Sequence:  Nucleic Acid
  misc_feature: DNAzyme
gccacccaggctagctacaacgacctcccaa

SEQ ID NO: 12768 - DNA, 31 bp, Artificial Sequence
  Description of Artificial Sequence:  Nucleic Acid
  misc_feature: DNAzyme
ggcggccaggctagctacaacgaccaccctc

SEQ ID NO: 12769 - DNA, 31 bp, Artificial Sequence
  Description of Artificial Sequence:  Nucleic Acid
  misc_feature: DNAzyme
ttgggcggggctagctacaacgacacccacc

SEQ ID NO: 12770 - DNA, 31 bp, Artificial Sequence
  Description of Artificial Sequence:  Nucleic Acid
  misc_feature: DNAzyme
gagttgggggctagctacaacgaggccaccc

SEQ ID NO: 12771 - DNA, 31 bp, Artificial Sequence
  Description of Artificial Sequence:  Nucleic Acid
  misc_feature: DNAzyme
ggagcgagggctagctacaacgatgggcggc

SEQ ID NO: 12772 - DNA, 31 bp, Artificial Sequence
  Description of Artificial Sequence:  Nucleic Acid
  misc_feature: DNAzyme
ggggggagggctagctacaacgagagttggg

SEQ ID NO: 12773 - DNA, 31 bp, Artificial Sequence
  Description of Artificial Sequence:  Nucleic Acid
  misc_feature: DNAzyme
cgaaacggggctagctacaacgatctggggg

SEQ ID NO: 12774 - DNA, 31 bp, Artificial Sequence
  Description of Artificial Sequence:  Nucleic Acid
  misc_feature: DNAzyme
ggccgaaaggctagctacaacgaggctctgg

SEQ ID NO: 12775 - DNA, 31 bp, Artificial Sequence
  Description of Artificial Sequence:  Nucleic Acid
  misc_feature: DNAzyme
cacgaaggggctagctacaacgacgaaacgg

SEQ ID NO: 12776 - DNA, 31 bp, Artificial Sequence
  Description of Artificial Sequence:  Nucleic Acid
  misc_feature: DNAzyme
ggcgcccaggctagctacaacgagaaggccg

SEQ ID NO: 12777 - DNA, 31 bp, Artificial Sequence
  Description of Artificial Sequence:  Nucleic Acid
  misc_feature: DNAzyme
tgccggcgggctagctacaacgaccacgaag

SEQ ID NO: 12778 - DNA, 31 bp, Artificial Sequence
  Description of Artificial Sequence:  Nucleic Acid
  misc_feature: DNAzyme
gatgccggggctagctacaacgagcccacga

SEQ ID NO: 12779 - DNA, 31 bp, Artificial Sequence
  Description of Artificial Sequence:  Nucleic Acid
  misc_feature: DNAzyme
cagcgatgggctagctacaacgacggcgccc

SEQ ID NO: 12780 - DNA, 31 bp, Artificial Sequence
  Description of Artificial Sequence:  Nucleic Acid
  misc_feature: DNAzyme
gccagcgaggctagctacaacgagccggcgc

SEQ ID NO: 12781 - DNA, 31 bp, Artificial Sequence
  Description of Artificial Sequence:  Nucleic Acid
  misc_feature: DNAzyme
cgcgccagggctagctacaacgagatgccgg

SEQ ID NO: 12782 - DNA, 31 bp, Artificial Sequence
  Description of Artificial Sequence:  Nucleic Acid
  misc_feature: DNAzyme
cagccgcgggctagctacaacgacagcgatg

SEQ ID NO: 12783 - DNA, 31 bp, Artificial Sequence
  Description of Artificial Sequence:  Nucleic Acid
  misc_feature: DNAzyme
aacagccgggctagctacaacgagccagcga

SEQ ID NO: 12784 - DNA, 31 bp, Artificial Sequence
  Description of Artificial Sequence:  Nucleic Acid
  misc_feature: DNAzyme
gccaacagggctagctacaacgacgcgccag

SEQ ID NO: 12785 - DNA, 31 bp, Artificial Sequence
  Description of Artificial Sequence:  Nucleic Acid
  misc_feature: DNAzyme
gctgccaaggctagctacaacgaagccgcgc

SEQ ID NO: 12786 - DNA, 31 bp, Artificial Sequence
  Description of Artificial Sequence:  Nucleic Acid
  misc_feature: DNAzyme
ctatgctgggctagctacaacgacaacagcc

SEQ ID NO: 12787 - DNA, 31 bp, Artificial Sequence
  Description of Artificial Sequence:  Nucleic Acid
  misc_feature: DNAzyme
ggcctatgggctagctacaacgatgccaaca

SEQ ID NO: 12788 - DNA, 31 bp, Artificial Sequence
  Description of Artificial Sequence:  Nucleic Acid
  misc_feature: DNAzyme
aaggcctaggctagctacaacgagctgccaa

SEQ ID NO: 12789 - DNA, 31 bp, Artificial Sequence
  Description of Artificial Sequence:  Nucleic Acid
  misc_feature: DNAzyme
tcccaaggggctagctacaacgactatgctg

SEQ ID NO: 12790 - DNA, 31 bp, Artificial Sequence
  Description of Artificial Sequence:  Nucleic Acid
  misc_feature: DNAzyme
tacaagcaggctagctacaacgacttcccaa

SEQ ID NO: 12791 - DNA, 31 bp, Artificial Sequence
  Description of Artificial Sequence:  Nucleic Acid
  misc_feature: DNAzyme
tctacaagggctagctacaacgaaccttccc

SEQ ID NO: 12792 - DNA, 31 bp, Artificial Sequence
  Description of Artificial Sequence:  Nucleic Acid
  misc_feature: DNAzyme
aatgtctaggctagctacaacgaaagcacct

SEQ ID NO: 12793 - DNA, 31 bp, Artificial Sequence
  Description of Artificial Sequence:  Nucleic Acid
  misc_feature: DNAzyme
ccagaatgggctagctacaacgactacaagc

SEQ ID NO: 12794 - DNA, 31 bp, Artificial Sequence
  Description of Artificial Sequence:  Nucleic Acid
  misc_feature: DNAzyme
cgccagaaggctagctacaacgagtctacaa

SEQ ID NO: 12795 - DNA, 31 bp, Artificial Sequence
  Description of Artificial Sequence:  Nucleic Acid
  misc_feature: DNAzyme
atagcccgggctagctacaacgacagaatgt

SEQ ID NO: 12796 - DNA, 31 bp, Artificial Sequence
  Description of Artificial Sequence:  Nucleic Acid
  misc_feature: DNAzyme
ctccatagggctagctacaacgaccgccaga

SEQ ID NO: 12797 - DNA, 31 bp, Artificial Sequence
  Description of Artificial Sequence:  Nucleic Acid
  misc_feature: DNAzyme
ctgctccaggctagctacaacgaagcccgcc

SEQ ID NO: 12798 - DNA, 31 bp, Artificial Sequence
  Description of Artificial Sequence:  Nucleic Acid
  misc_feature: DNAzyme
cactcctgggctagctacaacgatccatagc

SEQ ID NO: 12799 - DNA, 31 bp, Artificial Sequence
  Description of Artificial Sequence:  Nucleic Acid
  misc_feature: DNAzyme
acccgccaggctagctacaacgatcctgctc

SEQ ID NO: 12800 - DNA, 31 bp, Artificial Sequence
  Description of Artificial Sequence:  Nucleic Acid
  misc_feature: DNAzyme
agcacccgggctagctacaacgacactcctg

SEQ ID NO: 12801 - DNA, 31 bp, Artificial Sequence
  Description of Artificial Sequence:  Nucleic Acid
  misc_feature: DNAzyme
cgagagcaggctagctacaacgaccgccact

SEQ ID NO: 12802 - DNA, 31 bp, Artificial Sequence
  Description of Artificial Sequence:  Nucleic Acid
  misc_feature: DNAzyme
cacgagagggctagctacaacgaacccgcca

SEQ ID NO: 12803 - DNA, 31 bp, Artificial Sequence
  Description of Artificial Sequence:  Nucleic Acid
  misc_feature: DNAzyme
gaaggccaggctagctacaacgagagagcac

SEQ ID NO: 12804 - DNA, 31 bp, Artificial Sequence
  Description of Artificial Sequence:  Nucleic Acid
  misc_feature: DNAzyme
cttgaaggggctagctacaacgacacgagag

SEQ ID NO: 12805 - DNA, 31 bp, Artificial Sequence
  Description of Artificial Sequence:  Nucleic Acid
  misc_feature: DNAzyme
gctcatgaggctagctacaacgacttgaagg

SEQ ID NO: 12806 - DNA, 31 bp, Artificial Sequence
  Description of Artificial Sequence:  Nucleic Acid
  misc_feature: DNAzyme
cccgctcaggctagctacaacgagaccttga

SEQ ID NO: 12807 - DNA, 31 bp, Artificial Sequence
  Description of Artificial Sequence:  Nucleic Acid
  misc_feature: DNAzyme
tctccccgggctagctacaacgatcatgacc

SEQ ID NO: 12808 - DNA, 31 bp, Artificial Sequence
  Description of Artificial Sequence:  Nucleic Acid
  misc_feature: DNAzyme
agaaggcaggctagctacaacgactccccgc

SEQ ID NO: 12809 - DNA, 31 bp, Artificial Sequence
  Description of Artificial Sequence:  Nucleic Acid
  misc_feature: DNAzyme
gtagaaggggctagctacaacgaatctcccc

SEQ ID NO: 12810 - DNA, 31 bp, Artificial Sequence
  Description of Artificial Sequence:  Nucleic Acid
  misc_feature: DNAzyme
gtcctcggggctagctacaacgaagaaggca

SEQ ID NO: 12811 - DNA, 31 bp, Artificial Sequence
  Description of Artificial Sequence:  Nucleic Acid
  misc_feature: DNAzyme
tgaccaggggctagctacaacgacctcggta

SEQ ID NO: 12812 - DNA, 31 bp, Artificial Sequence
  Description of Artificial Sequence:  Nucleic Acid
  misc_feature: DNAzyme
taagttgaggctagctacaacgacaggtcct

SEQ ID NO: 12813 - DNA, 31 bp, Artificial Sequence
  Description of Artificial Sequence:  Nucleic Acid
  misc_feature: DNAzyme
ggagtaagggctagctacaacgatgaccagg

SEQ ID NO: 12814 - DNA, 31 bp, Artificial Sequence
  Description of Artificial Sequence:  Nucleic Acid
  misc_feature: DNAzyme
gcagggagggctagctacaacgaaagttgac

SEQ ID NO: 12815 - DNA, 31 bp, Artificial Sequence
  Description of Artificial Sequence:  Nucleic Acid
  misc_feature: DNAzyme
gaggatggggctagctacaacgaagggagta

SEQ ID NO: 12816 - DNA, 31 bp, Artificial Sequence
  Description of Artificial Sequence:  Nucleic Acid
  misc_feature: DNAzyme
agagaggaggctagctacaacgaggcaggga

SEQ ID NO: 12817 - DNA, 31 bp, Artificial Sequence
  Description of Artificial Sequence:  Nucleic Acid
  misc_feature: DNAzyme
ccagggcgggctagctacaacgacaggagag

SEQ ID NO: 12818 - DNA, 31 bp, Artificial Sequence
  Description of Artificial Sequence:  Nucleic Acid
  misc_feature: DNAzyme
gaccagggggctagctacaacgagccaggag

SEQ ID NO: 12819 - DNA, 31 bp, Artificial Sequence
  Description of Artificial Sequence:  Nucleic Acid
  misc_feature: DNAzyme
cccgacgaggctagctacaacgacagggcgc

SEQ ID NO: 12820 - DNA, 31 bp, Artificial Sequence
  Description of Artificial Sequence:  Nucleic Acid
  misc_feature: DNAzyme
caccccgaggctagctacaacgagaccaggg

SEQ ID NO: 12821 - DNA, 31 bp, Artificial Sequence
  Description of Artificial Sequence:  Nucleic Acid
  misc_feature: DNAzyme
gcacaccaggctagctacaacgacccgacga

SEQ ID NO: 12822 - DNA, 31 bp, Artificial Sequence
  Description of Artificial Sequence:  Nucleic Acid
  misc_feature: DNAzyme
tgcgcacaggctagctacaacgacaccccga

SEQ ID NO: 12823 - DNA, 31 bp, Artificial Sequence
  Description of Artificial Sequence:  Nucleic Acid
  misc_feature: DNAzyme
gctgcgcaggctagctacaacgaaccacccc

SEQ ID NO: 12824 - DNA, 31 bp, Artificial Sequence
  Description of Artificial Sequence:  Nucleic Acid
  misc_feature: DNAzyme
tcgctgcgggctagctacaacgaacaccacc

SEQ ID NO: 12825 - DNA, 31 bp, Artificial Sequence
  Description of Artificial Sequence:  Nucleic Acid
  misc_feature: DNAzyme
tatcgctgggctagctacaacgagcacacca

SEQ ID NO: 12826 - DNA, 31 bp, Artificial Sequence
  Description of Artificial Sequence:  Nucleic Acid
  misc_feature: DNAzyme
cagtatcgggctagctacaacgatgcgcaca

SEQ ID NO: 12827 - DNA, 31 bp, Artificial Sequence
  Description of Artificial Sequence:  Nucleic Acid
  misc_feature: DNAzyme
acgcagtaggctagctacaacgacgctgcgc

SEQ ID NO: 12828 - DNA, 31 bp, Artificial Sequence
  Description of Artificial Sequence:  Nucleic Acid
  misc_feature: DNAzyme
cgacgcagggctagctacaacgaatcgctgc

SEQ ID NO: 12829 - DNA, 31 bp, Artificial Sequence
  Description of Artificial Sequence:  Nucleic Acid
  misc_feature: DNAzyme
tgccgacgggctagctacaacgaagtatcgc

SEQ ID NO: 12830 - DNA, 31 bp, Artificial Sequence
  Description of Artificial Sequence:  Nucleic Acid
  misc_feature: DNAzyme
catgccgaggctagctacaacgagcagtatc

SEQ ID NO: 12831 - DNA, 31 bp, Artificial Sequence
  Description of Artificial Sequence:  Nucleic Acid
  misc_feature: DNAzyme
cccacatgggctagctacaacgacgacgcag

SEQ ID NO: 12832 - DNA, 31 bp, Artificial Sequence
  Description of Artificial Sequence:  Nucleic Acid
  misc_feature: DNAzyme
ggcccacaggctagctacaacgagccgacgc

SEQ ID NO: 12833 - DNA, 31 bp, Artificial Sequence
  Description of Artificial Sequence:  Nucleic Acid
  misc_feature: DNAzyme
tgggcccaggctagctacaacgaatgccgac

SEQ ID NO: 12834 - DNA, 31 bp, Artificial Sequence
  Description of Artificial Sequence:  Nucleic Acid
  misc_feature: DNAzyme
ctcctgggggctagctacaacgaccacatgc

SEQ ID NO: 12835 - DNA, 31 bp, Artificial Sequence
  Description of Artificial Sequence:  Nucleic Acid
  misc_feature: DNAzyme
gcacagcgggctagctacaacgacctctcct

SEQ ID NO: 12836 - DNA, 31 bp, Artificial Sequence
  Description of Artificial Sequence:  Nucleic Acid
  misc_feature: DNAzyme
ctgcacagggctagctacaacgagccctctc

SEQ ID NO: 12837 - DNA, 31 bp, Artificial Sequence
  Description of Artificial Sequence:  Nucleic Acid
  misc_feature: DNAzyme
ccactgcaggctagctacaacgaagcgccct

SEQ ID NO: 12838 - DNA, 31 bp, Artificial Sequence
  Description of Artificial Sequence:  Nucleic Acid
  misc_feature: DNAzyme
atccactgggctagctacaacgaacagcgcc

SEQ ID NO: 12839 - DNA, 31 bp, Artificial Sequence
  Description of Artificial Sequence:  Nucleic Acid
  misc_feature: DNAzyme
ttcatccaggctagctacaacgatgcacagc

SEQ ID NO: 12840 - DNA, 31 bp, Artificial Sequence
  Description of Artificial Sequence:  Nucleic Acid
  misc_feature: DNAzyme
ccgattcaggctagctacaacgaccactgca

SEQ ID NO: 12841 - DNA, 31 bp, Artificial Sequence
  Description of Artificial Sequence:  Nucleic Acid
  misc_feature: DNAzyme
tcagccgaggctagctacaacgatcatccac

SEQ ID NO: 12842 - DNA, 31 bp, Artificial Sequence
  Description of Artificial Sequence:  Nucleic Acid
  misc_feature: DNAzyme
gctatcagggctagctacaacgacgattcat

SEQ ID NO: 12843 - DNA, 31 bp, Artificial Sequence
  Description of Artificial Sequence:  Nucleic Acid
  misc_feature: DNAzyme
gaacgctaggctagctacaacgacagccgat

SEQ ID NO: 12844 - DNA, 31 bp, Artificial Sequence
  Description of Artificial Sequence:  Nucleic Acid
  misc_feature: DNAzyme
agcgaacgggctagctacaacgatatcagcc

SEQ ID NO: 12845 - DNA, 31 bp, Artificial Sequence
  Description of Artificial Sequence:  Nucleic Acid
  misc_feature: DNAzyme
gaagcgaaggctagctacaacgagctatcag

SEQ ID NO: 12846 - DNA, 31 bp, Artificial Sequence
  Description of Artificial Sequence:  Nucleic Acid
  misc_feature: DNAzyme
ccgcgaagggctagctacaacgagaacgcta

SEQ ID NO: 12847 - DNA, 31 bp, Artificial Sequence
  Description of Artificial Sequence:  Nucleic Acid
  misc_feature: DNAzyme
ttgccccgggctagctacaacgagaagcgaa

SEQ ID NO: 12848 - DNA, 31 bp, Artificial Sequence
  Description of Artificial Sequence:  Nucleic Acid
  misc_feature: DNAzyme
catggttgggctagctacaacgacccgcgaa

SEQ ID NO: 12849 - DNA, 31 bp, Artificial Sequence
  Description of Artificial Sequence:  Nucleic Acid
  misc_feature: DNAzyme
agacatggggctagctacaacgatgccccgc

SEQ ID NO: 12850 - DNA, 31 bp, Artificial Sequence
  Description of Artificial Sequence:  Nucleic Acid
  misc_feature: DNAzyme
gggagacaggctagctacaacgaggttgccc

SEQ ID NO: 12851 - DNA, 31 bp, Artificial Sequence
  Description of Artificial Sequence:  Nucleic Acid
  misc_feature: DNAzyme
gggggagaggctagctacaacgaatggttgc

SEQ ID NO: 12852 - DNA, 31 bp, Artificial Sequence
  Description of Artificial Sequence:  Nucleic Acid
  misc_feature: DNAzyme
atagtgcgggctagctacaacgagggggaga

SEQ ID NO: 12853 - DNA, 31 bp, Artificial Sequence
  Description of Artificial Sequence:  Nucleic Acid
  misc_feature: DNAzyme
acatagtgggctagctacaacgagtggggga

SEQ ID NO: 12854 - DNA, 31 bp, Artificial Sequence
  Description of Artificial Sequence:  Nucleic Acid
  misc_feature: DNAzyme
gcacatagggctagctacaacgagcgtgggg

SEQ ID NO: 12855 - DNA, 31 bp, Artificial Sequence
  Description of Artificial Sequence:  Nucleic Acid
  misc_feature: DNAzyme
caggcacaggctagctacaacgaagtgcgtg

SEQ ID NO: 12856 - DNA, 31 bp, Artificial Sequence
  Description of Artificial Sequence:  Nucleic Acid
  misc_feature: DNAzyme
ctcaggcaggctagctacaacgaatagtgcg

SEQ ID NO: 12857 - DNA, 31 bp, Artificial Sequence
  Description of Artificial Sequence:  Nucleic Acid
  misc_feature: DNAzyme
ctctcaggggctagctacaacgaacatagtg

SEQ ID NO: 12858 - DNA, 31 bp, Artificial Sequence
  Description of Artificial Sequence:  Nucleic Acid
  misc_feature: DNAzyme
ctgcgtcgggctagctacaacgatctcaggc

SEQ ID NO: 12859 - DNA, 31 bp, Artificial Sequence
  Description of Artificial Sequence:  Nucleic Acid
  misc_feature: DNAzyme
ccgctgcgggctagctacaacgacgctctca

SEQ ID NO: 12860 - DNA, 31 bp, Artificial Sequence
  Description of Artificial Sequence:  Nucleic Acid
  misc_feature: DNAzyme
cgccgctgggctagctacaacgagtcgctct

SEQ ID NO: 12861 - DNA, 31 bp, Artificial Sequence
  Description of Artificial Sequence:  Nucleic Acid
  misc_feature: DNAzyme
gcgcgccgggctagctacaacgatgcgtcgc

SEQ ID NO: 12862 - DNA, 31 bp, Artificial Sequence
  Description of Artificial Sequence:  Nucleic Acid
  misc_feature: DNAzyme
gacgcgcgggctagctacaacgacgctgcgt

SEQ ID NO: 12863 - DNA, 31 bp, Artificial Sequence
  Description of Artificial Sequence:  Nucleic Acid
  misc_feature: DNAzyme
gtgacgcgggctagctacaacgagccgctgc

SEQ ID NO: 12864 - DNA, 31 bp, Artificial Sequence
  Description of Artificial Sequence:  Nucleic Acid
  misc_feature: DNAzyme
gtgtgacgggctagctacaacgagcgccgct

SEQ ID NO: 12865 - DNA, 31 bp, Artificial Sequence
  Description of Artificial Sequence:  Nucleic Acid
  misc_feature: DNAzyme
ttgtgtgaggctagctacaacgagcgcgccg

SEQ ID NO: 12866 - DNA, 31 bp, Artificial Sequence
  Description of Artificial Sequence:  Nucleic Acid
  misc_feature: DNAzyme
gatttgtgggctagctacaacgagacgcgcg

SEQ ID NO: 12867 - DNA, 31 bp, Artificial Sequence
  Description of Artificial Sequence:  Nucleic Acid
  misc_feature: DNAzyme
aggatttgggctagctacaacgagtgacgcg

SEQ ID NO: 12868 - DNA, 31 bp, Artificial Sequence
  Description of Artificial Sequence:  Nucleic Acid
  misc_feature: DNAzyme
ggagaggaggctagctacaacgattgtgtga

SEQ ID NO: 12869 - DNA, 31 bp, Artificial Sequence
  Description of Artificial Sequence:  Nucleic Acid
  misc_feature: DNAzyme
tggtgaggggctagctacaacgatggagagg

SEQ ID NO: 12870 - DNA, 31 bp, Artificial Sequence
  Description of Artificial Sequence:  Nucleic Acid
  misc_feature: DNAzyme
agtgatggggctagctacaacgagaggctgg

SEQ ID NO: 12871 - DNA, 31 bp, Artificial Sequence
  Description of Artificial Sequence:  Nucleic Acid
  misc_feature: DNAzyme
ctgagtgaggctagctacaacgaggtgaggc

SEQ ID NO: 12872 - DNA, 31 bp, Artificial Sequence
  Description of Artificial Sequence:  Nucleic Acid
  misc_feature: DNAzyme
cagctgagggctagctacaacgagatggtga

SEQ ID NO: 12873 - DNA, 31 bp, Artificial Sequence
  Description of Artificial Sequence:  Nucleic Acid
  misc_feature: DNAzyme
ctcagcagggctagctacaacgatgagtgat

SEQ ID NO: 12874 - DNA, 31 bp, Artificial Sequence
  Description of Artificial Sequence:  Nucleic Acid
  misc_feature: DNAzyme
ctcctcagggctagctacaacgaagctgagt

SEQ ID NO: 12875 - DNA, 31 bp, Artificial Sequence
  Description of Artificial Sequence:  Nucleic Acid
  misc_feature: DNAzyme
tgatggagggctagctacaacgactcctcag

SEQ ID NO: 12876 - DNA, 31 bp, Artificial Sequence
  Description of Artificial Sequence:  Nucleic Acid
  misc_feature: DNAzyme
tccactgaggctagctacaacgaggagcctc

SEQ ID NO: 12877 - DNA, 31 bp, Artificial Sequence
  Description of Artificial Sequence:  Nucleic Acid
  misc_feature: DNAzyme
ttgatccaggctagctacaacgatgatggag

SEQ ID NO: 12878 - DNA, 31 bp, Artificial Sequence
  Description of Artificial Sequence:  Nucleic Acid
  misc_feature: DNAzyme
ctcattgaggctagctacaacgaccactgat

SEQ ID NO: 12879 - DNA, 31 bp, Artificial Sequence
  Description of Artificial Sequence:  Nucleic Acid
  misc_feature: DNAzyme
agtcctcaggctagctacaacgatgatccac

SEQ ID NO: 12880 - DNA, 31 bp, Artificial Sequence
  Description of Artificial Sequence:  Nucleic Acid
  misc_feature: DNAzyme
tggagcagggctagctacaacgacctcattg

SEQ ID NO: 12881 - DNA, 31 bp, Artificial Sequence
  Description of Artificial Sequence:  Nucleic Acid
  misc_feature: DNAzyme
gcgtggagggctagctacaacgaagtcctca

SEQ ID NO: 12882 - DNA, 31 bp, Artificial Sequence
  Description of Artificial Sequence:  Nucleic Acid
  misc_feature: DNAzyme
acatggcgggctagctacaacgaggagcagt

SEQ ID NO: 12883 - DNA, 31 bp, Artificial Sequence
  Description of Artificial Sequence:  Nucleic Acid
  misc_feature: DNAzyme
gaacatggggctagctacaacgagtggagca

SEQ ID NO: 12884 - DNA, 31 bp, Artificial Sequence
  Description of Artificial Sequence:  Nucleic Acid
  misc_feature: DNAzyme
ccggaacaggctagctacaacgaggcgtgga

SEQ ID NO: 12885 - DNA, 31 bp, Artificial Sequence
  Description of Artificial Sequence:  Nucleic Acid
  misc_feature: DNAzyme
agccggaaggctagctacaacgaatggcgtg

SEQ ID NO: 12886 - DNA, 31 bp, Artificial Sequence
  Description of Artificial Sequence:  Nucleic Acid
  misc_feature: DNAzyme
gccacgagggctagctacaacgacggaacat

SEQ ID NO: 12887 - DNA, 31 bp, Artificial Sequence
  Description of Artificial Sequence:  Nucleic Acid
  misc_feature: DNAzyme
cttagccaggctagctacaacgagagccgga

SEQ ID NO: 12888 - DNA, 31 bp, Artificial Sequence
  Description of Artificial Sequence:  Nucleic Acid
  misc_feature: DNAzyme
tcccttagggctagctacaacgacacgagcc

SEQ ID NO: 12889 - DNA, 31 bp, Artificial Sequence
  Description of Artificial Sequence:  Nucleic Acid
  misc_feature: DNAzyme
cccaaacaggctagctacaacgacccttagc

SEQ ID NO: 12890 - DNA, 31 bp, Artificial Sequence
  Description of Artificial Sequence:  Nucleic Acid
  misc_feature: DNAzyme
gtcccaaaggctagctacaacgaatccctta

SEQ ID NO: 12891 - DNA, 31 bp, Artificial Sequence
  Description of Artificial Sequence:  Nucleic Acid
  misc_feature: DNAzyme
atatccagggctagctacaacgacccaaaca

SEQ ID NO: 12892 - DNA, 31 bp, Artificial Sequence
  Description of Artificial Sequence:  Nucleic Acid
  misc_feature: DNAzyme
cgtgcataggctagctacaacgaccagtccc

SEQ ID NO: 12893 - DNA, 31 bp, Artificial Sequence
  Description of Artificial Sequence:  Nucleic Acid
  misc_feature: DNAzyme
accgtgcaggctagctacaacgaatccagtc

SEQ ID NO: 12894 - DNA, 31 bp, Artificial Sequence
  Description of Artificial Sequence:  Nucleic Acid
  misc_feature: DNAzyme
acaccgtgggctagctacaacgaatatccag

SEQ ID NO: 12895 - DNA, 31 bp, Artificial Sequence
  Description of Artificial Sequence:  Nucleic Acid
  misc_feature: DNAzyme
caacaccgggctagctacaacgagcatatcc

SEQ ID NO: 12896 - DNA, 31 bp, Artificial Sequence
  Description of Artificial Sequence:  Nucleic Acid
  misc_feature: DNAzyme
agtcaacaggctagctacaacgacgtgcata

SEQ ID NO: 12897 - DNA, 31 bp, Artificial Sequence
  Description of Artificial Sequence:  Nucleic Acid
  misc_feature: DNAzyme
tcagtcaaggctagctacaacgaaccgtgca

SEQ ID NO: 12898 - DNA, 31 bp, Artificial Sequence
  Description of Artificial Sequence:  Nucleic Acid
  misc_feature: DNAzyme
gaagtcagggctagctacaacgacaacaccg

SEQ ID NO: 12899 - DNA, 31 bp, Artificial Sequence
  Description of Artificial Sequence:  Nucleic Acid
  misc_feature: DNAzyme
tcttgaagggctagctacaacgacagtcaac

SEQ ID NO: 12900 - DNA, 31 bp, Artificial Sequence
  Description of Artificial Sequence:  Nucleic Acid
  misc_feature: DNAzyme
aagccaggggctagctacaacgacttgaagt

SEQ ID NO: 12901 - DNA, 31 bp, Artificial Sequence
  Description of Artificial Sequence:  Nucleic Acid
  misc_feature: DNAzyme
gactgaagggctagctacaacgacaggtctt

SEQ ID NO: 12902 - DNA, 31 bp, Artificial Sequence
  Description of Artificial Sequence:  Nucleic Acid
  misc_feature: DNAzyme
agcttggaggctagctacaacgatgaagcca

SEQ ID NO: 12903 - DNA, 31 bp, Artificial Sequence
  Description of Artificial Sequence:  Nucleic Acid
  misc_feature: DNAzyme
ggcaggagggctagctacaacgattggactg

SEQ ID NO: 12904 - DNA, 31 bp, Artificial Sequence
  Description of Artificial Sequence:  Nucleic Acid
  misc_feature: DNAzyme
aaccgcggggctagctacaacgaaggagctt

SEQ ID NO: 12905 - DNA, 31 bp, Artificial Sequence
  Description of Artificial Sequence:  Nucleic Acid
  misc_feature: DNAzyme
ggcaaccgggctagctacaacgaggcaggag

SEQ ID NO: 12906 - DNA, 31 bp, Artificial Sequence
  Description of Artificial Sequence:  Nucleic Acid
  misc_feature: DNAzyme
cccggcaaggctagctacaacgacgcggcag

SEQ ID NO: 12907 - DNA, 31 bp, Artificial Sequence
  Description of Artificial Sequence:  Nucleic Acid
  misc_feature: DNAzyme
actcccggggctagctacaacgaaaccgcgg

SEQ ID NO: 12908 - DNA, 31 bp, Artificial Sequence
  Description of Artificial Sequence:  Nucleic Acid
  misc_feature: DNAzyme
gaaagggaggctagctacaacgatcccggca

SEQ ID NO: 12909 - DNA, 31 bp, Artificial Sequence
  Description of Artificial Sequence:  Nucleic Acid
  misc_feature: DNAzyme
cgttggcaggctagctacaacgagagaagaa

SEQ ID NO: 12910 - DNA, 31 bp, Artificial Sequence
  Description of Artificial Sequence:  Nucleic Acid
  misc_feature: DNAzyme
cacgttggggctagctacaacgaatgagaag

SEQ ID NO: 12911 - DNA, 31 bp, Artificial Sequence
  Description of Artificial Sequence:  Nucleic Acid
  misc_feature: DNAzyme
tacccacgggctagctacaacgatggcatga

SEQ ID NO: 12912 - DNA, 31 bp, Artificial Sequence
  Description of Artificial Sequence:  Nucleic Acid
  misc_feature: DNAzyme
tgtacccaggctagctacaacgagttggcat

SEQ ID NO: 12913 - DNA, 31 bp, Artificial Sequence
  Description of Artificial Sequence:  Nucleic Acid
  misc_feature: DNAzyme
cccctgtaggctagctacaacgaccacgttg

SEQ ID NO: 12914 - DNA, 31 bp, Artificial Sequence
  Description of Artificial Sequence:  Nucleic Acid
  misc_feature: DNAzyme
cccccctgggctagctacaacgaacccacgt

SEQ ID NO: 12915 - DNA, 31 bp, Artificial Sequence
  Description of Artificial Sequence:  Nucleic Acid
  misc_feature: DNAzyme
ccgccagaggctagctacaacgaccccctgt

SEQ ID NO: 12916 - DNA, 31 bp, Artificial Sequence
  Description of Artificial Sequence:  Nucleic Acid
  misc_feature: DNAzyme
tctccccgggctagctacaacgacagacccc

SEQ ID NO: 12917 - DNA, 31 bp, Artificial Sequence
  Description of Artificial Sequence:  Nucleic Acid
  misc_feature: DNAzyme
tgataccgggctagctacaacgactccccgc

SEQ ID NO: 12918 - DNA, 31 bp, Artificial Sequence
  Description of Artificial Sequence:  Nucleic Acid
  misc_feature: DNAzyme
gcatgataggctagctacaacgacgtctccc

SEQ ID NO: 12919 - DNA, 31 bp, Artificial Sequence
  Description of Artificial Sequence:  Nucleic Acid
  misc_feature: DNAzyme
ttgcatgaggctagctacaacgaaccgtctc

SEQ ID NO: 12920 - DNA, 31 bp, Artificial Sequence
  Description of Artificial Sequence:  Nucleic Acid
  misc_feature: DNAzyme
ggtttgcaggctagctacaacgagataccgt

SEQ ID NO: 12921 - DNA, 31 bp, Artificial Sequence
  Description of Artificial Sequence:  Nucleic Acid
  misc_feature: DNAzyme
gtggtttgggctagctacaacgaatgatacc

SEQ ID NO: 12922 - DNA, 31 bp, Artificial Sequence
  Description of Artificial Sequence:  Nucleic Acid
  misc_feature: DNAzyme
gcaggtggggctagctacaacgattgcatga

SEQ ID NO: 12923 - DNA, 31 bp, Artificial Sequence
  Description of Artificial Sequence:  Nucleic Acid
  misc_feature: DNAzyme
tgggcaggggctagctacaacgaggtttgca

SEQ ID NO: 12924 - DNA, 31 bp, Artificial Sequence
  Description of Artificial Sequence:  Nucleic Acid
  misc_feature: DNAzyme
cgcatgggggctagctacaacgaaggtggtt

SEQ ID NO: 12925 - DNA, 31 bp, Artificial Sequence
  Description of Artificial Sequence:  Nucleic Acid
  misc_feature: DNAzyme
gctccgcaggctagctacaacgagggcaggt

SEQ ID NO: 12926 - DNA, 31 bp, Artificial Sequence
  Description of Artificial Sequence:  Nucleic Acid
  misc_feature: DNAzyme
gcgctccgggctagctacaacgaatgggcag

SEQ ID NO: 12927 - DNA, 31 bp, Artificial Sequence
  Description of Artificial Sequence:  Nucleic Acid
  misc_feature: DNAzyme
gatctgcgggctagctacaacgatccgcatg

SEQ ID NO: 12928 - DNA, 31 bp, Artificial Sequence
  Description of Artificial Sequence:  Nucleic Acid
  misc_feature: DNAzyme
gtgatctgggctagctacaacgagctccgca

SEQ ID NO: 12929 - DNA, 31 bp, Artificial Sequence
  Description of Artificial Sequence:  Nucleic Acid
  misc_feature: DNAzyme
tccagtgaggctagctacaacgactgcgctc

SEQ ID NO: 12930 - DNA, 31 bp, Artificial Sequence
  Description of Artificial Sequence:  Nucleic Acid
  misc_feature: DNAzyme
atgtccagggctagctacaacgagatctgcg

SEQ ID NO: 12931 - DNA, 31 bp, Artificial Sequence
  Description of Artificial Sequence:  Nucleic Acid
  misc_feature: DNAzyme
ttgacatgggctagctacaacgaccagtgat

SEQ ID NO: 12932 - DNA, 31 bp, Artificial Sequence
  Description of Artificial Sequence:  Nucleic Acid
  misc_feature: DNAzyme
tcttgacaggctagctacaacgagtccagtg

SEQ ID NO: 12933 - DNA, 31 bp, Artificial Sequence
  Description of Artificial Sequence:  Nucleic Acid
  misc_feature: DNAzyme
gttcttgaggctagctacaacgaatgtccag

SEQ ID NO: 12934 - DNA, 31 bp, Artificial Sequence
  Description of Artificial Sequence:  Nucleic Acid
  misc_feature: DNAzyme
tggaaccgggctagctacaacgatcttgaca

SEQ ID NO: 12935 - DNA, 31 bp, Artificial Sequence
  Description of Artificial Sequence:  Nucleic Acid
  misc_feature: DNAzyme
tcatggaaggctagctacaacgacgttcttg

SEQ ID NO: 12936 - DNA, 31 bp, Artificial Sequence
  Description of Artificial Sequence:  Nucleic Acid
  misc_feature: DNAzyme
gatcctcaggctagctacaacgaggaaccgt

SEQ ID NO: 12937 - DNA, 31 bp, Artificial Sequence
  Description of Artificial Sequence:  Nucleic Acid
  misc_feature: DNAzyme
cccgacgaggctagctacaacgacctcatgg

SEQ ID NO: 12938 - DNA, 31 bp, Artificial Sequence
  Description of Artificial Sequence:  Nucleic Acid
  misc_feature: DNAzyme
aggcccgaggctagctacaacgagatcctca

SEQ ID NO: 12939 - DNA, 31 bp, Artificial Sequence
  Description of Artificial Sequence:  Nucleic Acid
  misc_feature: DNAzyme
gtcttaggggctagctacaacgaccgacgat

SEQ ID NO: 12940 - DNA, 31 bp, Artificial Sequence
  Description of Artificial Sequence:  Nucleic Acid
  misc_feature: DNAzyme
gctacaggggctagctacaacgacttaggcc

SEQ ID NO: 12941 - DNA, 31 bp, Artificial Sequence
  Description of Artificial Sequence:  Nucleic Acid
  misc_feature: DNAzyme
tgttgctaggctagctacaacgaaggtctta

SEQ ID NO: 12942 - DNA, 31 bp, Artificial Sequence
  Description of Artificial Sequence:  Nucleic Acid
  misc_feature: DNAzyme
acgtgttgggctagctacaacgatacaggtc

SEQ ID NO: 12943 - DNA, 31 bp, Artificial Sequence
  Description of Artificial Sequence:  Nucleic Acid
  misc_feature: DNAzyme
gccacgtgggctagctacaacgatgctacag

SEQ ID NO: 12944 - DNA, 31 bp, Artificial Sequence
  Description of Artificial Sequence:  Nucleic Acid
  misc_feature: DNAzyme
atgccacgggctagctacaacgagttgctac

SEQ ID NO: 12945 - DNA, 31 bp, Artificial Sequence
  Description of Artificial Sequence:  Nucleic Acid
  misc_feature: DNAzyme
ccatgccaggctagctacaacgagtgttgct

SEQ ID NO: 12946 - DNA, 31 bp, Artificial Sequence
  Description of Artificial Sequence:  Nucleic Acid
  misc_feature: DNAzyme
gttccatgggctagctacaacgacacgtgtt

SEQ ID NO: 12947 - DNA, 31 bp, Artificial Sequence
  Description of Artificial Sequence:  Nucleic Acid
  misc_feature: DNAzyme
atgttccaggctagctacaacgagccacgtg

SEQ ID NO: 12948 - DNA, 31 bp, Artificial Sequence
  Description of Artificial Sequence:  Nucleic Acid
  misc_feature: DNAzyme
ggggaatgggctagctacaacgatccatgcc

SEQ ID NO: 12949 - DNA, 31 bp, Artificial Sequence
  Description of Artificial Sequence:  Nucleic Acid
  misc_feature: DNAzyme
atggggaaggctagctacaacgagttccatg

SEQ ID NO: 12950 - DNA, 31 bp, Artificial Sequence
  Description of Artificial Sequence:  Nucleic Acid
  misc_feature: DNAzyme
tgcgttgaggctagctacaacgaggggaatg

SEQ ID NO: 12951 - DNA, 31 bp, Artificial Sequence
  Description of Artificial Sequence:  Nucleic Acid
  misc_feature: DNAzyme
tgtatgcgggctagctacaacgatgatgggg

SEQ ID NO: 12952 - DNA, 31 bp, Artificial Sequence
  Description of Artificial Sequence:  Nucleic Acid
  misc_feature: DNAzyme
ggtgtatgggctagctacaacgagttgatgg

SEQ ID NO: 12953 - DNA, 31 bp, Artificial Sequence
  Description of Artificial Sequence:  Nucleic Acid
  misc_feature: DNAzyme
gtggtgtaggctagctacaacgagcgttgat

SEQ ID NO: 12954 - DNA, 31 bp, Artificial Sequence
  Description of Artificial Sequence:  Nucleic Acid
  misc_feature: DNAzyme
ccgtggtgggctagctacaacgaatgcgttg

SEQ ID NO: 12955 - DNA, 31 bp, Artificial Sequence
  Description of Artificial Sequence:  Nucleic Acid
  misc_feature: DNAzyme
gcccgtggggctagctacaacgagtatgcgt

SEQ ID NO: 12956 - DNA, 31 bp, Artificial Sequence
  Description of Artificial Sequence:  Nucleic Acid
  misc_feature: DNAzyme
ggggcccgggctagctacaacgaggtgtatg

SEQ ID NO: 12957 - DNA, 31 bp, Artificial Sequence
  Description of Artificial Sequence:  Nucleic Acid
  misc_feature: DNAzyme
tgcaggggggctagctacaacgaccgtggtg

SEQ ID NO: 12958 - DNA, 31 bp, Artificial Sequence
  Description of Artificial Sequence:  Nucleic Acid
  misc_feature: DNAzyme
agggtgtgggctagctacaacgaaggggccc

SEQ ID NO: 12959 - DNA, 31 bp, Artificial Sequence
  Description of Artificial Sequence:  Nucleic Acid
  misc_feature: DNAzyme
ggagggtgggctagctacaacgagcaggggc

SEQ ID NO: 12960 - DNA, 31 bp, Artificial Sequence
  Description of Artificial Sequence:  Nucleic Acid
  misc_feature: DNAzyme
ggggagggggctagctacaacgagtgcaggg

SEQ ID NO: 12961 - DNA, 31 bp, Artificial Sequence
  Description of Artificial Sequence:  Nucleic Acid
  misc_feature: DNAzyme
gtttggcgggctagctacaacgacggggagg

SEQ ID NO: 12962 - DNA, 31 bp, Artificial Sequence
  Description of Artificial Sequence:  Nucleic Acid
  misc_feature: DNAzyme
tagtttggggctagctacaacgagccgggga

SEQ ID NO: 12963 - DNA, 31 bp, Artificial Sequence
  Description of Artificial Sequence:  Nucleic Acid
  misc_feature: DNAzyme
tagaatagggctagctacaacgattggcgcc

SEQ ID NO: 12964 - DNA, 31 bp, Artificial Sequence
  Description of Artificial Sequence:  Nucleic Acid
  misc_feature: DNAzyme
ccctagaaggctagctacaacgaagtttggc

SEQ ID NO: 12965 - DNA, 31 bp, Artificial Sequence
  Description of Artificial Sequence:  Nucleic Acid
  misc_feature: DNAzyme
ccatagcgggctagctacaacgacctagaat

SEQ ID NO: 12966 - DNA, 31 bp, Artificial Sequence
  Description of Artificial Sequence:  Nucleic Acid
  misc_feature: DNAzyme
cgccatagggctagctacaacgagccctaga

SEQ ID NO: 12967 - DNA, 31 bp, Artificial Sequence
  Description of Artificial Sequence:  Nucleic Acid
  misc_feature: DNAzyme
acccgccaggctagctacaacgaagcgccct

SEQ ID NO: 12968 - DNA, 31 bp, Artificial Sequence
  Description of Artificial Sequence:  Nucleic Acid
  misc_feature: DNAzyme
gccacccgggctagctacaacgacatagcgc

SEQ ID NO: 12969 - DNA, 31 bp, Artificial Sequence
  Description of Artificial Sequence:  Nucleic Acid
  misc_feature: DNAzyme
agcggccaggctagctacaacgaccgccata

SEQ ID NO: 12970 - DNA, 31 bp, Artificial Sequence
  Description of Artificial Sequence:  Nucleic Acid
  misc_feature: DNAzyme
ctcagcggggctagctacaacgacacccgcc

SEQ ID NO: 12971 - DNA, 31 bp, Artificial Sequence
  Description of Artificial Sequence:  Nucleic Acid
  misc_feature: DNAzyme
ctcctcagggctagctacaacgaggccaccc

SEQ ID NO: 12972 - DNA, 31 bp, Artificial Sequence
  Description of Artificial Sequence:  Nucleic Acid
  misc_feature: DNAzyme
tccacgtaggctagctacaacgatcctcagc

SEQ ID NO: 12973 - DNA, 31 bp, Artificial Sequence
  Description of Artificial Sequence:  Nucleic Acid
  misc_feature: DNAzyme
cctccacgggctagctacaacgaactcctca

SEQ ID NO: 12974 - DNA, 31 bp, Artificial Sequence
  Description of Artificial Sequence:  Nucleic Acid
  misc_feature: DNAzyme
aacctccaggctagctacaacgagtactcct

SEQ ID NO: 12975 - DNA, 31 bp, Artificial Sequence
  Description of Artificial Sequence:  Nucleic Acid
  misc_feature: DNAzyme
ccgcgtaaggctagctacaacgactccacgt

SEQ ID NO: 12976 - DNA, 31 bp, Artificial Sequence
  Description of Artificial Sequence:  Nucleic Acid
  misc_feature: DNAzyme
cacccgcgggctagctacaacgaaacctcca

SEQ ID NO: 12977 - DNA, 31 bp, Artificial Sequence
  Description of Artificial Sequence:  Nucleic Acid
  misc_feature: DNAzyme
cccacccgggctagctacaacgagtaacctc

SEQ ID NO: 12978 - DNA, 31 bp, Artificial Sequence
  Description of Artificial Sequence:  Nucleic Acid
  misc_feature: DNAzyme
atcccccaggctagctacaacgaccgcgtaa

SEQ ID NO: 12979 - DNA, 31 bp, Artificial Sequence
  Description of Artificial Sequence:  Nucleic Acid
  misc_feature: DNAzyme
agtggaaaggctagctacaacgacccccacc

SEQ ID NO: 12980 - DNA, 31 bp, Artificial Sequence
  Description of Artificial Sequence:  Nucleic Acid
  misc_feature: DNAzyme
tcacgtagggctagctacaacgaggaaatcc

SEQ ID NO: 12981 - DNA, 31 bp, Artificial Sequence
  Description of Artificial Sequence:  Nucleic Acid
  misc_feature: DNAzyme
ccgtcacgggctagctacaacgaagtggaaa

SEQ ID NO: 12982 - DNA, 31 bp, Artificial Sequence
  Description of Artificial Sequence:  Nucleic Acid
  misc_feature: DNAzyme
gcccgtcaggctagctacaacgagtagtgga

SEQ ID NO: 12983 - DNA, 31 bp, Artificial Sequence
  Description of Artificial Sequence:  Nucleic Acid
  misc_feature: DNAzyme
catgcccgggctagctacaacgacacgtagt

SEQ ID NO: 12984 - DNA, 31 bp, Artificial Sequence
  Description of Artificial Sequence:  Nucleic Acid
  misc_feature: DNAzyme
tggtcatgggctagctacaacgaccgtcacg

SEQ ID NO: 12985 - DNA, 31 bp, Artificial Sequence
  Description of Artificial Sequence:  Nucleic Acid
  misc_feature: DNAzyme
agtggtcaggctagctacaacgagcccgtca

SEQ ID NO: 12986 - DNA, 31 bp, Artificial Sequence
  Description of Artificial Sequence:  Nucleic Acid
  misc_feature: DNAzyme
gtcagtggggctagctacaacgacatgcccg

SEQ ID NO: 12987 - DNA, 31 bp, Artificial Sequence
  Description of Artificial Sequence:  Nucleic Acid
  misc_feature: DNAzyme
gttgtcagggctagctacaacgaggtcatgc

SEQ ID NO: 12988 - DNA, 31 bp, Artificial Sequence
  Description of Artificial Sequence:  Nucleic Acid
  misc_feature: DNAzyme
ttacgttgggctagctacaacgacagtggtc

SEQ ID NO: 12989 - DNA, 31 bp, Artificial Sequence
  Description of Artificial Sequence:  Nucleic Acid
  misc_feature: DNAzyme
attttacgggctagctacaacgatgtcagtg

SEQ ID NO: 12990 - DNA, 31 bp, Artificial Sequence
  Description of Artificial Sequence:  Nucleic Acid
  misc_feature: DNAzyme
gcattttaggctagctacaacgagttgtcag

SEQ ID NO: 12991 - DNA, 31 bp, Artificial Sequence
  Description of Artificial Sequence:  Nucleic Acid
  misc_feature: DNAzyme
cacgggcaggctagctacaacgatttacgtt

SEQ ID NO: 12992 - DNA, 31 bp, Artificial Sequence
  Description of Artificial Sequence:  Nucleic Acid
  misc_feature: DNAzyme
ggcacgggggctagctacaacgaattttacg

SEQ ID NO: 12993 - DNA, 31 bp, Artificial Sequence
  Description of Artificial Sequence:  Nucleic Acid
  misc_feature: DNAzyme
acctggcaggctagctacaacgagggcattt

SEQ ID NO: 12994 - DNA, 31 bp, Artificial Sequence
  Description of Artificial Sequence:  Nucleic Acid
  misc_feature: DNAzyme
gaacctggggctagctacaacgaacgggcat

SEQ ID NO: 12995 - DNA, 31 bp, Artificial Sequence
  Description of Artificial Sequence:  Nucleic Acid
  misc_feature: DNAzyme
gggcggaaggctagctacaacgactggcacg

SEQ ID NO: 12996 - DNA, 31 bp, Artificial Sequence
  Description of Artificial Sequence:  Nucleic Acid
  misc_feature: DNAzyme
tcggggggggctagctacaacgaggaacctg

SEQ ID NO: 12997 - DNA, 31 bp, Artificial Sequence
  Description of Artificial Sequence:  Nucleic Acid
  misc_feature: DNAzyme
gtgaagaaggctagctacaacgatcgggggg

SEQ ID NO: 12998 - DNA, 31 bp, Artificial Sequence
  Description of Artificial Sequence:  Nucleic Acid
  misc_feature: DNAzyme
cacttccgggctagctacaacgagaagaatt

SEQ ID NO: 12999 - DNA, 31 bp, Artificial Sequence
  Description of Artificial Sequence:  Nucleic Acid
  misc_feature: DNAzyme
cccatccaggctagctacaacgattccgtga

SEQ ID NO: 13000 - DNA, 31 bp, Artificial Sequence
  Description of Artificial Sequence:  Nucleic Acid
  misc_feature: DNAzyme
gtaccccaggctagctacaacgaccacttcc

SEQ ID NO: 13001 - DNA, 31 bp, Artificial Sequence
  Description of Artificial Sequence:  Nucleic Acid
  misc_feature: DNAzyme
caggcgtaggctagctacaacgacccatcca

SEQ ID NO: 13002 - DNA, 31 bp, Artificial Sequence
  Description of Artificial Sequence:  Nucleic Acid
  misc_feature: DNAzyme
tgcaggcgggctagctacaacgaaccccatc

SEQ ID NO: 13003 - DNA, 31 bp, Artificial Sequence
  Description of Artificial Sequence:  Nucleic Acid
  misc_feature: DNAzyme
tgtgcaggggctagctacaacgagtacccca

SEQ ID NO: 13004 - DNA, 31 bp, Artificial Sequence
  Description of Artificial Sequence:  Nucleic Acid
  misc_feature: DNAzyme
tttctgtgggctagctacaacgaaggcgtac

SEQ ID NO: 13005 - DNA, 31 bp, Artificial Sequence
  Description of Artificial Sequence:  Nucleic Acid
  misc_feature: DNAzyme
cgtttctgggctagctacaacgagcaggcgt

SEQ ID NO: 13006 - DNA, 31 bp, Artificial Sequence
  Description of Artificial Sequence:  Nucleic Acid
  misc_feature: DNAzyme
ccggagcgggctagctacaacgattctgtgc

SEQ ID NO: 13007 - DNA, 31 bp, Artificial Sequence
  Description of Artificial Sequence:  Nucleic Acid
  misc_feature: DNAzyme
cgccggagggctagctacaacgagtttctgt

SEQ ID NO: 13008 - DNA, 31 bp, Artificial Sequence
  Description of Artificial Sequence:  Nucleic Acid
  misc_feature: DNAzyme
tccacacgggctagctacaacgacggagcgt

SEQ ID NO: 13009 - DNA, 31 bp, Artificial Sequence
  Description of Artificial Sequence:  Nucleic Acid
  misc_feature: DNAzyme
ggtccacaggctagctacaacgagccggagc

SEQ ID NO: 13010 - DNA, 31 bp, Artificial Sequence
  Description of Artificial Sequence:  Nucleic Acid
  misc_feature: DNAzyme
gaggtccaggctagctacaacgaacgccgga

SEQ ID NO: 13011 - DNA, 31 bp, Artificial Sequence
  Description of Artificial Sequence:  Nucleic Acid
  misc_feature: DNAzyme
aggagaggggctagctacaacgaccacacgc

SEQ ID NO: 13012 - DNA, 31 bp, Artificial Sequence
  Description of Artificial Sequence:  Nucleic Acid
  misc_feature: DNAzyme
tcctcccgggctagctacaacgaaggagagg

SEQ ID NO: 13013 - DNA, 31 bp, Artificial Sequence
  Description of Artificial Sequence:  Nucleic Acid
  misc_feature: DNAzyme
gaatgtgaggctagctacaacgactcctccc

SEQ ID NO: 13014 - DNA, 31 bp, Artificial Sequence
  Description of Artificial Sequence:  Nucleic Acid
  misc_feature: DNAzyme
ctggaatgggctagctacaacgagacctcct

SEQ ID NO: 13015 - DNA, 31 bp, Artificial Sequence
  Description of Artificial Sequence:  Nucleic Acid
  misc_feature: DNAzyme
acctggaaggctagctacaacgagtgacctc

SEQ ID NO: 13016 - DNA, 31 bp, Artificial Sequence
  Description of Artificial Sequence:  Nucleic Acid
  misc_feature: DNAzyme
gagcccgaggctagctacaacgactggaatg

SEQ ID NO: 13017 - DNA, 31 bp, Artificial Sequence
  Description of Artificial Sequence:  Nucleic Acid
  misc_feature: DNAzyme
tggttgagggctagctacaacgaccgacctg

SEQ ID NO: 13018 - DNA, 31 bp, Artificial Sequence
  Description of Artificial Sequence:  Nucleic Acid
  misc_feature: DNAzyme
ggtattggggctagctacaacgatgagcccg

SEQ ID NO: 13019 - DNA, 31 bp, Artificial Sequence
  Description of Artificial Sequence:  Nucleic Acid
  misc_feature: DNAzyme
accaggtaggctagctacaacgatggttgag

SEQ ID NO: 13020 - DNA, 31 bp, Artificial Sequence
  Description of Artificial Sequence:  Nucleic Acid
  misc_feature: DNAzyme
caaccaggggctagctacaacgaattggttg

SEQ ID NO: 13021 - DNA, 31 bp, Artificial Sequence
  Description of Artificial Sequence:  Nucleic Acid
  misc_feature: DNAzyme
tgacccaaggctagctacaacgacaggtatt

SEQ ID NO: 13022 - DNA, 31 bp, Artificial Sequence
  Description of Artificial Sequence:  Nucleic Acid
  misc_feature: DNAzyme
agctgtgaggctagctacaacgaccaaccag

SEQ ID NO: 13023 - DNA, 31 bp, Artificial Sequence
  Description of Artificial Sequence:  Nucleic Acid
  misc_feature: DNAzyme
gggagctgggctagctacaacgagacccaac

SEQ ID NO: 13024 - DNA, 31 bp, Artificial Sequence
  Description of Artificial Sequence:  Nucleic Acid
  misc_feature: DNAzyme
catgggagggctagctacaacgatgtgaccc

SEQ ID NO: 13025 - DNA, 31 bp, Artificial Sequence
  Description of Artificial Sequence:  Nucleic Acid
  misc_feature: DNAzyme
ggctcgcaggctagctacaacgagggagctg

SEQ ID NO: 13026 - DNA, 31 bp, Artificial Sequence
  Description of Artificial Sequence:  Nucleic Acid
  misc_feature: DNAzyme
cgggctcgggctagctacaacgaatgggagc

SEQ ID NO: 13027 - DNA, 31 bp, Artificial Sequence
  Description of Artificial Sequence:  Nucleic Acid
  misc_feature: DNAzyme
ggttcgggggctagctacaacgatcgcatgg

SEQ ID NO: 13028 - DNA, 31 bp, Artificial Sequence
  Description of Artificial Sequence:  Nucleic Acid
  misc_feature: DNAzyme
acatccggggctagctacaacgatcgggctc

SEQ ID NO: 13029 - DNA, 31 bp, Artificial Sequence
  Description of Artificial Sequence:  Nucleic Acid
  misc_feature: DNAzyme
ctgctacaggctagctacaacgaccggttcg

SEQ ID NO: 13030 - DNA, 31 bp, Artificial Sequence
  Description of Artificial Sequence:  Nucleic Acid
  misc_feature: DNAzyme
cactgctaggctagctacaacgaatccggtt

SEQ ID NO: 13031 - DNA, 31 bp, Artificial Sequence
  Description of Artificial Sequence:  Nucleic Acid
  misc_feature: DNAzyme
gagcactgggctagctacaacgatacatccg

SEQ ID NO: 13032 - DNA, 31 bp, Artificial Sequence
  Description of Artificial Sequence:  Nucleic Acid
  misc_feature: DNAzyme
cgtgagcaggctagctacaacgatgctacat

SEQ ID NO: 13033 - DNA, 31 bp, Artificial Sequence
  Description of Artificial Sequence:  Nucleic Acid
  misc_feature: DNAzyme
gacgtgagggctagctacaacgaactgctac

SEQ ID NO: 13034 - DNA, 31 bp, Artificial Sequence
  Description of Artificial Sequence:  Nucleic Acid
  misc_feature: DNAzyme
catggacgggctagctacaacgagagcactg

SEQ ID NO: 13035 - DNA, 31 bp, Artificial Sequence
  Description of Artificial Sequence:  Nucleic Acid
  misc_feature: DNAzyme
agcatggaggctagctacaacgagtgagcac

SEQ ID NO: 13036 - DNA, 31 bp, Artificial Sequence
  Description of Artificial Sequence:  Nucleic Acid
  misc_feature: DNAzyme
ggtgagcaggctagctacaacgaggacgtga

SEQ ID NO: 13037 - DNA, 31 bp, Artificial Sequence
  Description of Artificial Sequence:  Nucleic Acid
  misc_feature: DNAzyme
tcggtgagggctagctacaacgaatggacgt

SEQ ID NO: 13038 - DNA, 31 bp, Artificial Sequence
  Description of Artificial Sequence:  Nucleic Acid
  misc_feature: DNAzyme
ggggtcggggctagctacaacgagagcatgg

SEQ ID NO: 13039 - DNA, 31 bp, Artificial Sequence
  Description of Artificial Sequence:  Nucleic Acid
  misc_feature: DNAzyme
gggaggggggctagctacaacgacggtgagc

SEQ ID NO: 13040 - DNA, 31 bp, Artificial Sequence
  Description of Artificial Sequence:  Nucleic Acid
  misc_feature: DNAzyme
ctgtaatgggctagctacaacgagggagggg

SEQ ID NO: 13041 - DNA, 31 bp, Artificial Sequence
  Description of Artificial Sequence:  Nucleic Acid
  misc_feature: DNAzyme
tcctgtaaggctagctacaacgagtgggagg

SEQ ID NO: 13042 - DNA, 31 bp, Artificial Sequence
  Description of Artificial Sequence:  Nucleic Acid
  misc_feature: DNAzyme
ctctcctgggctagctacaacgaaatgtggg

SEQ ID NO: 13043 - DNA, 31 bp, Artificial Sequence
  Description of Artificial Sequence:  Nucleic Acid
  misc_feature: DNAzyme
cttagccgggctagctacaacgactctcctg

SEQ ID NO: 13044 - DNA, 31 bp, Artificial Sequence
  Description of Artificial Sequence:  Nucleic Acid
  misc_feature: DNAzyme
acgcttagggctagctacaacgacgtctctc

SEQ ID NO: 13045 - DNA, 31 bp, Artificial Sequence
  Description of Artificial Sequence:  Nucleic Acid
  misc_feature: DNAzyme
agcctacgggctagctacaacgattagccgt

SEQ ID NO: 13046 - DNA, 31 bp, Artificial Sequence
  Description of Artificial Sequence:  Nucleic Acid
  misc_feature: DNAzyme
ccagcctaggctagctacaacgagcttagcc

SEQ ID NO: 13047 - DNA, 31 bp, Artificial Sequence
  Description of Artificial Sequence:  Nucleic Acid
  misc_feature: DNAzyme
ctggccagggctagctacaacgactacgctt

SEQ ID NO: 13048 - DNA, 31 bp, Artificial Sequence
  Description of Artificial Sequence:  Nucleic Acid
  misc_feature: DNAzyme
ccccctggggctagctacaacgacagcctac

SEQ ID NO: 13049 - DNA, 31 bp, Artificial Sequence
  Description of Artificial Sequence:  Nucleic Acid
  misc_feature: DNAzyme
gggggagaggctagctacaacgacccctggc

SEQ ID NO: 13050 - DNA, 31 bp, Artificial Sequence
  Description of Artificial Sequence:  Nucleic Acid
  misc_feature: DNAzyme
ggagctggggctagctacaacgacaaggagg

SEQ ID NO: 13051 - DNA, 31 bp, Artificial Sequence
  Description of Artificial Sequence:  Nucleic Acid
  misc_feature: DNAzyme
ctgaggagggctagctacaacgatggccaag

SEQ ID NO: 13052 - DNA, 31 bp, Artificial Sequence
  Description of Artificial Sequence:  Nucleic Acid
  misc_feature: DNAzyme
ctggctagggctagctacaacgatgaggagc

SEQ ID NO: 13053 - DNA, 31 bp, Artificial Sequence
  Description of Artificial Sequence:  Nucleic Acid
  misc_feature: DNAzyme
acagctggggctagctacaacgatagctgag

SEQ ID NO: 13054 - DNA, 31 bp, Artificial Sequence
  Description of Artificial Sequence:  Nucleic Acid
  misc_feature: DNAzyme
gcagacagggctagctacaacgatggctagc

SEQ ID NO: 13055 - DNA, 31 bp, Artificial Sequence
  Description of Artificial Sequence:  Nucleic Acid
  misc_feature: DNAzyme
ggcgcagaggctagctacaacgaagctggct

SEQ ID NO: 13056 - DNA, 31 bp, Artificial Sequence
  Description of Artificial Sequence:  Nucleic Acid
  misc_feature: DNAzyme
agaaggcgggctagctacaacgaagacagct

SEQ ID NO: 13057 - DNA, 31 bp, Artificial Sequence
  Description of Artificial Sequence:  Nucleic Acid
  misc_feature: DNAzyme
gaagaaggggctagctacaacgagcagacag

SEQ ID NO: 13058 - DNA, 31 bp, Artificial Sequence
  Description of Artificial Sequence:  Nucleic Acid
  misc_feature: DNAzyme
gtatgtcgggctagctacaacgacttcgaag

SEQ ID NO: 13059 - DNA, 31 bp, Artificial Sequence
  Description of Artificial Sequence:  Nucleic Acid
  misc_feature: DNAzyme
aatgtatgggctagctacaacgacgccttcg

SEQ ID NO: 13060 - DNA, 31 bp, Artificial Sequence
  Description of Artificial Sequence:  Nucleic Acid
  misc_feature: DNAzyme
gtaatgtaggctagctacaacgagtcgcctt

SEQ ID NO: 13061 - DNA, 31 bp, Artificial Sequence
  Description of Artificial Sequence:  Nucleic Acid
  misc_feature: DNAzyme
gggtaatgggctagctacaacgaatgtcgcc

SEQ ID NO: 13062 - DNA, 31 bp, Artificial Sequence
  Description of Artificial Sequence:  Nucleic Acid
  misc_feature: DNAzyme
ttgggtaaggctagctacaacgagtatgtcg

SEQ ID NO: 13063 - DNA, 31 bp, Artificial Sequence
  Description of Artificial Sequence:  Nucleic Acid
  misc_feature: DNAzyme
atattgggggctagctacaacgaaatgtatg

SEQ ID NO: 13064 - DNA, 31 bp, Artificial Sequence
  Description of Artificial Sequence:  Nucleic Acid
  misc_feature: DNAzyme
gagtcataggctagctacaacgatgggtaat

SEQ ID NO: 13065 - DNA, 31 bp, Artificial Sequence
  Description of Artificial Sequence:  Nucleic Acid
  misc_feature: DNAzyme
gggagtcaggctagctacaacgaattgggta

SEQ ID NO: 13066 - DNA, 31 bp, Artificial Sequence
  Description of Artificial Sequence:  Nucleic Acid
  misc_feature: DNAzyme
ctggggagggctagctacaacgacatattgg

SEQ ID NO: 13067 - DNA, 31 bp, Artificial Sequence
  Description of Artificial Sequence:  Nucleic Acid
  misc_feature: DNAzyme
ggtcaaagggctagctacaacgactggggag

SEQ ID NO: 13068 - DNA, 31 bp, Artificial Sequence
  Description of Artificial Sequence:  Nucleic Acid
  misc_feature: DNAzyme
cgatgaggggctagctacaacgacaaagtct

SEQ ID NO: 13069 - DNA, 31 bp, Artificial Sequence
  Description of Artificial Sequence:  Nucleic Acid
  misc_feature: DNAzyme
ggcctcgaggctagctacaacgagaggtcaa

SEQ ID NO: 13070 - DNA, 31 bp, Artificial Sequence
  Description of Artificial Sequence:  Nucleic Acid
  misc_feature: DNAzyme
gaggttggggctagctacaacgactcgatga

SEQ ID NO: 13071 - DNA, 31 bp, Artificial Sequence
  Description of Artificial Sequence:  Nucleic Acid
  misc_feature: DNAzyme
acaggaggggctagctacaacgatggcctcg

SEQ ID NO: 13072 - DNA, 31 bp, Artificial Sequence
  Description of Artificial Sequence:  Nucleic Acid
  misc_feature: DNAzyme
tgccgccaggctagctacaacgaaggaggtt

SEQ ID NO: 13073 - DNA, 31 bp, Artificial Sequence
  Description of Artificial Sequence:  Nucleic Acid
  misc_feature: DNAzyme
tcctgccgggctagctacaacgacacaggag

SEQ ID NO: 13074 - DNA, 31 bp, Artificial Sequence
  Description of Artificial Sequence:  Nucleic Acid
  misc_feature: DNAzyme
atctcctgggctagctacaacgacgccacag

SEQ ID NO: 13075 - DNA, 31 bp, Artificial Sequence
  Description of Artificial Sequence:  Nucleic Acid
  misc_feature: DNAzyme
accgcccaggctagctacaacgactcctgcc

SEQ ID NO: 13076 - DNA, 31 bp, Artificial Sequence
  Description of Artificial Sequence:  Nucleic Acid
  misc_feature: DNAzyme
tgttaccgggctagctacaacgaccatctcc

SEQ ID NO: 13077 - DNA, 31 bp, Artificial Sequence
  Description of Artificial Sequence:  Nucleic Acid
  misc_feature: DNAzyme
tgatgttaggctagctacaacgacgcccatc

SEQ ID NO: 13078 - DNA, 31 bp, Artificial Sequence
  Description of Artificial Sequence:  Nucleic Acid
  misc_feature: DNAzyme
gagtgatgggctagctacaacgataccgccc

SEQ ID NO: 13079 - DNA, 31 bp, Artificial Sequence
  Description of Artificial Sequence:  Nucleic Acid
  misc_feature: DNAzyme
gcgagtgaggctagctacaacgagttaccgc

SEQ ID NO: 13080 - DNA, 31 bp, Artificial Sequence
  Description of Artificial Sequence:  Nucleic Acid
  misc_feature: DNAzyme
cacgcgagggctagctacaacgagatgttac

SEQ ID NO: 13081 - DNA, 31 bp, Artificial Sequence
  Description of Artificial Sequence:  Nucleic Acid
  misc_feature: DNAzyme
actccacgggctagctacaacgagagtgatg

SEQ ID NO: 13082 - DNA, 31 bp, Artificial Sequence
  Description of Artificial Sequence:  Nucleic Acid
  misc_feature: DNAzyme
tgactccaggctagctacaacgagcgagtga

SEQ ID NO: 13083 - DNA, 31 bp, Artificial Sequence
  Description of Artificial Sequence:  Nucleic Acid
  misc_feature: DNAzyme
ttctctgaggctagctacaacgatccacgcg

SEQ ID NO: 13084 - DNA, 31 bp, Artificial Sequence
  Description of Artificial Sequence:  Nucleic Acid
  misc_feature: DNAzyme
ctaccttaggctagctacaacgatctctgac

SEQ ID NO: 13085 - DNA, 31 bp, Artificial Sequence
  Description of Artificial Sequence:  Nucleic Acid
  misc_feature: DNAzyme
ggtaactaggctagctacaacgacttattct

SEQ ID NO: 13086 - DNA, 31 bp, Artificial Sequence
  Description of Artificial Sequence:  Nucleic Acid
  misc_feature: DNAzyme
cagggtaaggctagctacaacgataccttat

SEQ ID NO: 13087 - DNA, 31 bp, Artificial Sequence
  Description of Artificial Sequence:  Nucleic Acid
  misc_feature: DNAzyme
gtccagggggctagctacaacgaaactacct

SEQ ID NO: 13088 - DNA, 31 bp, Artificial Sequence
  Description of Artificial Sequence:  Nucleic Acid
  misc_feature: DNAzyme
caaaagagggctagctacaacgaccagggta

SEQ ID NO: 13089 - DNA, 31 bp, Artificial Sequence
  Description of Artificial Sequence:  Nucleic Acid
  misc_feature: DNAzyme
gaagcgggggctagctacaacgacaaaagag

SEQ ID NO: 13090 - DNA, 31 bp, Artificial Sequence
  Description of Artificial Sequence:  Nucleic Acid
  misc_feature: DNAzyme
gctcgaagggctagctacaacgagggtcaaa

SEQ ID NO: 13091 - DNA, 31 bp, Artificial Sequence
  Description of Artificial Sequence:  Nucleic Acid
  misc_feature: DNAzyme
ctcctccgggctagctacaacgatcgaagcg

SEQ ID NO: 13092 - DNA, 31 bp, Artificial Sequence
  Description of Artificial Sequence:  Nucleic Acid
  misc_feature: DNAzyme
ctctctcaggctagctacaacgacctcctcc

SEQ ID NO: 13093 - DNA, 31 bp, Artificial Sequence
  Description of Artificial Sequence:  Nucleic Acid
  misc_feature: DNAzyme
aatggacaggctagctacaacgactctctct

SEQ ID NO: 13094 - DNA, 31 bp, Artificial Sequence
  Description of Artificial Sequence:  Nucleic Acid
  misc_feature: DNAzyme
ggaatggaggctagctacaacgaacctctct

SEQ ID NO: 13095 - DNA, 31 bp, Artificial Sequence
  Description of Artificial Sequence:  Nucleic Acid
  misc_feature: DNAzyme
cgccggaaggctagctacaacgaggacacct

SEQ ID NO: 13096 - DNA, 31 bp, Artificial Sequence
  Description of Artificial Sequence:  Nucleic Acid
  misc_feature: DNAzyme
gatctccgggctagctacaacgacggaatgg

SEQ ID NO: 13097 - DNA, 31 bp, Artificial Sequence
  Description of Artificial Sequence:  Nucleic Acid
  misc_feature: DNAzyme
ccgcaggaggctagctacaacgactccgccg

SEQ ID NO: 13098 - DNA, 31 bp, Artificial Sequence
  Description of Artificial Sequence:  Nucleic Acid
  misc_feature: DNAzyme
gatttccgggctagctacaacgaaggatctc

SEQ ID NO: 13099 - DNA, 31 bp, Artificial Sequence
  Description of Artificial Sequence:  Nucleic Acid
  misc_feature: DNAzyme
ttcttggaggctagctacaacgattccgcag

SEQ ID NO: 13100 - DNA, 31 bp, Artificial Sequence
  Description of Artificial Sequence:  Nucleic Acid
  misc_feature: DNAzyme
gaaggaaaggctagctacaacgattcttgga

SEQ ID NO: 13101 - DNA, 31 bp, Artificial Sequence
  Description of Artificial Sequence:  Nucleic Acid
  misc_feature: DNAzyme
gggtaacgggctagctacaacgatgaaggaa

SEQ ID NO: 13102 - DNA, 31 bp, Artificial Sequence
  Description of Artificial Sequence:  Nucleic Acid
  misc_feature: DNAzyme
atgggtaaggctagctacaacgagctgaagg

SEQ ID NO: 13103 - DNA, 31 bp, Artificial Sequence
  Description of Artificial Sequence:  Nucleic Acid
  misc_feature: DNAzyme
catatgggggctagctacaacgaaacgctga

SEQ ID NO: 13104 - DNA, 31 bp, Artificial Sequence
  Description of Artificial Sequence:  Nucleic Acid
  misc_feature: DNAzyme
tgcccataggctagctacaacgagggtaacg

SEQ ID NO: 13105 - DNA, 31 bp, Artificial Sequence
  Description of Artificial Sequence:  Nucleic Acid
  misc_feature: DNAzyme
cgtgcccaggctagctacaacgaatgggtaa

SEQ ID NO: 13106 - DNA, 31 bp, Artificial Sequence
  Description of Artificial Sequence:  Nucleic Acid
  misc_feature: DNAzyme
cgggcgtgggctagctacaacgaccatatgg

SEQ ID NO: 13107 - DNA, 31 bp, Artificial Sequence
  Description of Artificial Sequence:  Nucleic Acid
  misc_feature: DNAzyme
tccgggcgggctagctacaacgagcccatat

SEQ ID NO: 13108 - DNA, 31 bp, Artificial Sequence
  Description of Artificial Sequence:  Nucleic Acid
  misc_feature: DNAzyme
aatccgggggctagctacaacgagtgcccat

SEQ ID NO: 13109 - DNA, 31 bp, Artificial Sequence
  Description of Artificial Sequence:  Nucleic Acid
  misc_feature: DNAzyme
ggttgtaaggctagctacaacgaccgggcgt

SEQ ID NO: 13110 - DNA, 31 bp, Artificial Sequence
  Description of Artificial Sequence:  Nucleic Acid
  misc_feature: DNAzyme
gagggttgggctagctacaacgaaatccggg

SEQ ID NO: 13111 - DNA, 31 bp, Artificial Sequence
  Description of Artificial Sequence:  Nucleic Acid
  misc_feature: DNAzyme
gtggagggggctagctacaacgatgtaatcc

SEQ ID NO: 13112 - DNA, 31 bp, Artificial Sequence
  Description of Artificial Sequence:  Nucleic Acid
  misc_feature: DNAzyme
tctagtagggctagctacaacgaggagggtt

SEQ ID NO: 13113 - DNA, 31 bp, Artificial Sequence
  Description of Artificial Sequence:  Nucleic Acid
  misc_feature: DNAzyme
ggctctagggctagctacaacgaagtggagg

SEQ ID NO: 13114 - DNA, 31 bp, Artificial Sequence
  Description of Artificial Sequence:  Nucleic Acid
  misc_feature: DNAzyme
ttccagggggctagctacaacgatctagtag

SEQ ID NO: 13115 - DNA, 31 bp, Artificial Sequence
  Description of Artificial Sequence:  Nucleic Acid
  misc_feature: DNAzyme
agtctgggggctagctacaacgactttccag

SEQ ID NO: 13116 - DNA, 31 bp, Artificial Sequence
  Description of Artificial Sequence:  Nucleic Acid
  misc_feature: DNAzyme
ggacgtagggctagctacaacgactgggtct

SEQ ID NO: 13117 - DNA, 31 bp, Artificial Sequence
  Description of Artificial Sequence:  Nucleic Acid
  misc_feature: DNAzyme
gagggacgggctagctacaacgaagtctggg

SEQ ID NO: 13118 - DNA, 31 bp, Artificial Sequence
  Description of Artificial Sequence:  Nucleic Acid
  misc_feature: DNAzyme
cggagggaggctagctacaacgagtagtctg

SEQ ID NO: 13119 - DNA, 31 bp, Artificial Sequence
  Description of Artificial Sequence:  Nucleic Acid
  misc_feature: DNAzyme
gtgtaccaggctagctacaacgacggaggga

SEQ ID NO: 13120 - DNA, 31 bp, Artificial Sequence
  Description of Artificial Sequence:  Nucleic Acid
  misc_feature: DNAzyme
cccgtgtaggctagctacaacgacaccggag

SEQ ID NO: 13121 - DNA, 31 bp, Artificial Sequence
  Description of Artificial Sequence:  Nucleic Acid
  misc_feature: DNAzyme
cacccgtgggctagctacaacgaaccaccgg

SEQ ID NO: 13122 - DNA, 31 bp, Artificial Sequence
  Description of Artificial Sequence:  Nucleic Acid
  misc_feature: DNAzyme
ggcacccgggctagctacaacgagtaccacc

SEQ ID NO: 13123 - DNA, 31 bp, Artificial Sequence
  Description of Artificial Sequence:  Nucleic Acid
  misc_feature: DNAzyme
aatgggcaggctagctacaacgaccgtgtac

SEQ ID NO: 13124 - DNA, 31 bp, Artificial Sequence
  Description of Artificial Sequence:  Nucleic Acid
  misc_feature: DNAzyme
gcaatgggggctagctacaacgaacccgtgt

SEQ ID NO: 13125 - DNA, 31 bp, Artificial Sequence
  Description of Artificial Sequence:  Nucleic Acid
  misc_feature: DNAzyme
ggtggcaaggctagctacaacgagggcaccc

SEQ ID NO: 13126 - DNA, 31 bp, Artificial Sequence
  Description of Artificial Sequence:  Nucleic Acid
  misc_feature: DNAzyme
gcaggtggggctagctacaacgaaatgggca

SEQ ID NO: 13127 - DNA, 31 bp, Artificial Sequence
  Description of Artificial Sequence:  Nucleic Acid
  misc_feature: DNAzyme
ttggcaggggctagctacaacgaggcaatgg

SEQ ID NO: 13128 - DNA, 31 bp, Artificial Sequence
  Description of Artificial Sequence:  Nucleic Acid
  misc_feature: DNAzyme
ggccttggggctagctacaacgaaggtggca

SEQ ID NO: 13129 - DNA, 31 bp, Artificial Sequence
  Description of Artificial Sequence:  Nucleic Acid
  misc_feature: DNAzyme
tggaggggggctagctacaacgacttggcag

SEQ ID NO: 13130 - DNA, 31 bp, Artificial Sequence
  Description of Artificial Sequence:  Nucleic Acid
  misc_feature: DNAzyme
aggtggtaggctagctacaacgatggagggg

SEQ ID NO: 13131 - DNA, 31 bp, Artificial Sequence
  Description of Artificial Sequence:  Nucleic Acid
  misc_feature: DNAzyme
ggaggtggggctagctacaacgaattggagg

SEQ ID NO: 13132 - DNA, 31 bp, Artificial Sequence
  Description of Artificial Sequence:  Nucleic Acid
  misc_feature: DNAzyme
cgtggaggggctagctacaacgaggtattgg

SEQ ID NO: 13133 - DNA, 31 bp, Artificial Sequence
  Description of Artificial Sequence:  Nucleic Acid
  misc_feature: DNAzyme
ttcctccgggctagctacaacgaggaggtgg

SEQ ID NO: 13134 - DNA, 31 bp, Artificial Sequence
  Description of Artificial Sequence:  Nucleic Acid
  misc_feature: DNAzyme
aacaaccgggctagctacaacgacctcttcc

SEQ ID NO: 13135 - DNA, 31 bp, Artificial Sequence
  Description of Artificial Sequence:  Nucleic Acid
  misc_feature: DNAzyme
cagaacaaggctagctacaacgacgtcctct

SEQ ID NO: 13136 - DNA, 31 bp, Artificial Sequence
  Description of Artificial Sequence:  Nucleic Acid
  misc_feature: DNAzyme
tgtcagaaggctagctacaacgaaaccgtcc

SEQ ID NO: 13137 - DNA, 31 bp, Artificial Sequence
  Description of Artificial Sequence:  Nucleic Acid
  misc_feature: DNAzyme
ggactctgggctagctacaacgacagaacaa

SEQ ID NO: 13138 - DNA, 31 bp, Artificial Sequence
  Description of Artificial Sequence:  Nucleic Acid
  misc_feature: DNAzyme
acggtggaggctagctacaacgatctgtcag

SEQ ID NO: 13139 - DNA, 31 bp, Artificial Sequence
  Description of Artificial Sequence:  Nucleic Acid
  misc_feature: DNAzyme
agacacggggctagctacaacgaggactctg

SEQ ID NO: 13140 - DNA, 31 bp, Artificial Sequence
  Description of Artificial Sequence:  Nucleic Acid
  misc_feature: DNAzyme
agaagacaggctagctacaacgaggtggact

SEQ ID NO: 13141 - DNA, 31 bp, Artificial Sequence
  Description of Artificial Sequence:  Nucleic Acid
  misc_feature: DNAzyme
gcagaagaggctagctacaacgaacggtgga

SEQ ID NO: 13142 - DNA, 31 bp, Artificial Sequence
  Description of Artificial Sequence:  Nucleic Acid
  misc_feature: DNAzyme
cgccaaggggctagctacaacgaagaagaca

SEQ ID NO: 13143 - DNA, 31 bp, Artificial Sequence
  Description of Artificial Sequence:  Nucleic Acid
  misc_feature: DNAzyme
gagctccgggctagctacaacgacaaggcag

SEQ ID NO: 13144 - DNA, 31 bp, Artificial Sequence
  Description of Artificial Sequence:  Nucleic Acid
  misc_feature: DNAzyme
gtggcgagggctagctacaacgatccgccaa

SEQ ID NO: 13145 - DNA, 31 bp, Artificial Sequence
  Description of Artificial Sequence:  Nucleic Acid
  misc_feature: DNAzyme
ctttgtggggctagctacaacgagagctccg

SEQ ID NO: 13146 - DNA, 31 bp, Artificial Sequence
  Description of Artificial Sequence:  Nucleic Acid
  misc_feature: DNAzyme
ggtctttgggctagctacaacgaggcgagct

SEQ ID NO: 13147 - DNA, 31 bp, Artificial Sequence
  Description of Artificial Sequence:  Nucleic Acid
  misc_feature: DNAzyme
gccgaaggggctagctacaacgactttgtgg

SEQ ID NO: 13148 - DNA, 31 bp, Artificial Sequence
  Description of Artificial Sequence:  Nucleic Acid
  misc_feature: DNAzyme
cagagctgggctagctacaacgacgaaggtc

SEQ ID NO: 13149 - DNA, 31 bp, Artificial Sequence
  Description of Artificial Sequence:  Nucleic Acid
  misc_feature: DNAzyme
attcagagggctagctacaacgatgccgaag

SEQ ID NO: 13150 - DNA, 31 bp, Artificial Sequence
  Description of Artificial Sequence:  Nucleic Acid
  misc_feature: DNAzyme
gccgatgaggctagctacaacgatcagagct

SEQ ID NO: 13151 - DNA, 31 bp, Artificial Sequence
  Description of Artificial Sequence:  Nucleic Acid
  misc_feature: DNAzyme
gcggccgaggctagctacaacgagattcaga

SEQ ID NO: 13152 - DNA, 31 bp, Artificial Sequence
  Description of Artificial Sequence:  Nucleic Acid
  misc_feature: DNAzyme
atcagcggggctagctacaacgacgatgatt

SEQ ID NO: 13153 - DNA, 31 bp, Artificial Sequence
  Description of Artificial Sequence:  Nucleic Acid
  misc_feature: DNAzyme
tctatcagggctagctacaacgaggccgatg

SEQ ID NO: 13154 - DNA, 31 bp, Artificial Sequence
  Description of Artificial Sequence:  Nucleic Acid
  misc_feature: DNAzyme
tacctctaggctagctacaacgacagcggcc

SEQ ID NO: 13155 - DNA, 31 bp, Artificial Sequence
  Description of Artificial Sequence:  Nucleic Acid
  misc_feature: DNAzyme
ttgccgtaggctagctacaacgactctatca

SEQ ID NO: 13156 - DNA, 31 bp, Artificial Sequence
  Description of Artificial Sequence:  Nucleic Acid
  misc_feature: DNAzyme
ggttgccgggctagctacaacgaacctctat

SEQ ID NO: 13157 - DNA, 31 bp, Artificial Sequence
  Description of Artificial Sequence:  Nucleic Acid
  misc_feature: DNAzyme
ggcggttgggctagctacaacgacgtacctc

SEQ ID NO: 13158 - DNA, 31 bp, Artificial Sequence
  Description of Artificial Sequence:  Nucleic Acid
  misc_feature: DNAzyme
gggggcggggctagctacaacgatgccgtac

SEQ ID NO: 13159 - DNA, 31 bp, Artificial Sequence
  Description of Artificial Sequence:  Nucleic Acid
  misc_feature: DNAzyme
ggggggggggctagctacaacgaggttgccg

SEQ ID NO: 13160 - DNA, 31 bp, Artificial Sequence
  Description of Artificial Sequence:  Nucleic Acid
  misc_feature: DNAzyme
aggtctggggctagctacaacgacggggggg

SEQ ID NO: 13161 - DNA, 31 bp, Artificial Sequence
  Description of Artificial Sequence:  Nucleic Acid
  misc_feature: DNAzyme
attggaggggctagctacaacgactggtcgg

SEQ ID NO: 13162 - DNA, 31 bp, Artificial Sequence
  Description of Artificial Sequence:  Nucleic Acid
  misc_feature: DNAzyme
caccgtcaggctagctacaacgatggaggtc

SEQ ID NO: 13163 - DNA, 31 bp, Artificial Sequence
  Description of Artificial Sequence:  Nucleic Acid
  misc_feature: DNAzyme
cgtcaccgggctagctacaacgacattggag

SEQ ID NO: 13164 - DNA, 31 bp, Artificial Sequence
  Description of Artificial Sequence:  Nucleic Acid
  misc_feature: DNAzyme
ctgcgtcaggctagctacaacgacgtcattg

SEQ ID NO: 13165 - DNA, 31 bp, Artificial Sequence
  Description of Artificial Sequence:  Nucleic Acid
  misc_feature: DNAzyme
atcctgcgggctagctacaacgacaccgtca

SEQ ID NO: 13166 - DNA, 31 bp, Artificial Sequence
  Description of Artificial Sequence:  Nucleic Acid
  misc_feature: DNAzyme
ggatcctgggctagctacaacgagtcaccgt

SEQ ID NO: 13167 - DNA, 31 bp, Artificial Sequence
  Description of Artificial Sequence:  Nucleic Acid
  misc_feature: DNAzyme
acgtcggaggctagctacaacgacctgcgtc

SEQ ID NO: 13168 - DNA, 31 bp, Artificial Sequence
  Description of Artificial Sequence:  Nucleic Acid
  misc_feature: DNAzyme
actcaacgggctagctacaacgacggatcct

SEQ ID NO: 13169 - DNA, 31 bp, Artificial Sequence
  Description of Artificial Sequence:  Nucleic Acid
  misc_feature: DNAzyme
cgactcaaggctagctacaacgagtcggatc

SEQ ID NO: 13170 - DNA, 31 bp, Artificial Sequence
  Description of Artificial Sequence:  Nucleic Acid
  misc_feature: DNAzyme
gagtacgaggctagctacaacgatcaacgtc

SEQ ID NO: 13171 - DNA, 31 bp, Artificial Sequence
  Description of Artificial Sequence:  Nucleic Acid
  misc_feature: DNAzyme
gaggagtaggctagctacaacgagactcaac

SEQ ID NO: 13172 - DNA, 31 bp, Artificial Sequence
  Description of Artificial Sequence:  Nucleic Acid
  misc_feature: DNAzyme
tagaggagggctagctacaacgaacgactca

SEQ ID NO: 13173 - DNA, 31 bp, Artificial Sequence
  Description of Artificial Sequence:  Nucleic Acid
  misc_feature: DNAzyme
ggggggcaggctagctacaacgaagaggagt

SEQ ID NO: 13174 - DNA, 31 bp, Artificial Sequence
  Description of Artificial Sequence:  Nucleic Acid
  misc_feature: DNAzyme
agggggggggctagctacaacgaatagagga

SEQ ID NO: 13175 - DNA, 31 bp, Artificial Sequence
  Description of Artificial Sequence:  Nucleic Acid
  misc_feature: DNAzyme
tcccccggggctagctacaacgatccccctc

SEQ ID NO: 13176 - DNA, 31 bp, Artificial Sequence
  Description of Artificial Sequence:  Nucleic Acid
  misc_feature: DNAzyme
gatcgggaggctagctacaacgacccccggc

SEQ ID NO: 13177 - DNA, 31 bp, Artificial Sequence
  Description of Artificial Sequence:  Nucleic Acid
  misc_feature: DNAzyme
cgctgagaggctagctacaacgacgggatcc

SEQ ID NO: 13178 - DNA, 31 bp, Artificial Sequence
  Description of Artificial Sequence:  Nucleic Acid
  misc_feature: DNAzyme
acccgtcgggctagctacaacgatgagatcg

SEQ ID NO: 13179 - DNA, 31 bp, Artificial Sequence
  Description of Artificial Sequence:  Nucleic Acid
  misc_feature: DNAzyme
aagacccgggctagctacaacgacgctgaga

SEQ ID NO: 13180 - DNA, 31 bp, Artificial Sequence
  Description of Artificial Sequence:  Nucleic Acid
  misc_feature: DNAzyme
gaccaagaggctagctacaacgaccgtcgct

SEQ ID NO: 13181 - DNA, 31 bp, Artificial Sequence
  Description of Artificial Sequence:  Nucleic Acid
  misc_feature: DNAzyme
acggtagaggctagctacaacgacaagaccc

SEQ ID NO: 13182 - DNA, 31 bp, Artificial Sequence
  Description of Artificial Sequence:  Nucleic Acid
  misc_feature: DNAzyme
gctcacggggctagctacaacgaagaccaag

SEQ ID NO: 13183 - DNA, 31 bp, Artificial Sequence
  Description of Artificial Sequence:  Nucleic Acid
  misc_feature: DNAzyme
ttcgctcaggctagctacaacgaggtagacc

SEQ ID NO: 13184 - DNA, 31 bp, Artificial Sequence
  Description of Artificial Sequence:  Nucleic Acid
  misc_feature: DNAzyme
cctcttcgggctagctacaacgatcacggta

SEQ ID NO: 13185 - DNA, 31 bp, Artificial Sequence
  Description of Artificial Sequence:  Nucleic Acid
  misc_feature: DNAzyme
ctcgccagggctagctacaacgactcttcgc

SEQ ID NO: 13186 - DNA, 31 bp, Artificial Sequence
  Description of Artificial Sequence:  Nucleic Acid
  misc_feature: DNAzyme
catcctcgggctagctacaacgacagcctct

SEQ ID NO: 13187 - DNA, 31 bp, Artificial Sequence
  Description of Artificial Sequence:  Nucleic Acid
  misc_feature: DNAzyme
agacgacaggctagctacaacgacctcgcca

SEQ ID NO: 13188 - DNA, 31 bp, Artificial Sequence
  Description of Artificial Sequence:  Nucleic Acid
  misc_feature: DNAzyme
gcagacgaggctagctacaacgaatcctcgc

SEQ ID NO: 13189 - DNA, 31 bp, Artificial Sequence
  Description of Artificial Sequence:  Nucleic Acid
  misc_feature: DNAzyme
gcagcagaggctagctacaacgagacatcct

SEQ ID NO: 13190 - DNA, 31 bp, Artificial Sequence
  Description of Artificial Sequence:  Nucleic Acid
  misc_feature: DNAzyme
tcgagcagggctagctacaacgaagacgaca

SEQ ID NO: 13191 - DNA, 31 bp, Artificial Sequence
  Description of Artificial Sequence:  Nucleic Acid
  misc_feature: DNAzyme
acatcgagggctagctacaacgaagcagacg

SEQ ID NO: 13192 - DNA, 31 bp, Artificial Sequence
  Description of Artificial Sequence:  Nucleic Acid
  misc_feature: DNAzyme
gtaggacaggctagctacaacgacgagcagc

SEQ ID NO: 13193 - DNA, 31 bp, Artificial Sequence
  Description of Artificial Sequence:  Nucleic Acid
  misc_feature: DNAzyme
gtgtaggaggctagctacaacgaatcgagca

SEQ ID NO: 13194 - DNA, 31 bp, Artificial Sequence
  Description of Artificial Sequence:  Nucleic Acid
  misc_feature: DNAzyme
tccatgtgggctagctacaacgaaggacatc

SEQ ID NO: 13195 - DNA, 31 bp, Artificial Sequence
  Description of Artificial Sequence:  Nucleic Acid
  misc_feature: DNAzyme
cgtccatgggctagctacaacgagtaggaca

SEQ ID NO: 13196 - DNA, 31 bp, Artificial Sequence
  Description of Artificial Sequence:  Nucleic Acid
  misc_feature: DNAzyme
cccgtccaggctagctacaacgagtgtagga

SEQ ID NO: 13197 - DNA, 31 bp, Artificial Sequence
  Description of Artificial Sequence:  Nucleic Acid
  misc_feature: DNAzyme
ggcgcccgggctagctacaacgaccatgtgt

SEQ ID NO: 13198 - DNA, 31 bp, Artificial Sequence
  Description of Artificial Sequence:  Nucleic Acid
  misc_feature: DNAzyme
tcagggcgggctagctacaacgaccgtccat

SEQ ID NO: 13199 - DNA, 31 bp, Artificial Sequence
  Description of Artificial Sequence:  Nucleic Acid
  misc_feature: DNAzyme
gatcagggggctagctacaacgagcccgtcc

SEQ ID NO: 13200 - DNA, 31 bp, Artificial Sequence
  Description of Artificial Sequence:  Nucleic Acid
  misc_feature: DNAzyme
tggcgtgaggctagctacaacgacagggcgc

SEQ ID NO: 13201 - DNA, 31 bp, Artificial Sequence
  Description of Artificial Sequence:  Nucleic Acid
  misc_feature: DNAzyme
gcatggcgggctagctacaacgagatcaggg

SEQ ID NO: 13202 - DNA, 31 bp, Artificial Sequence
  Description of Artificial Sequence:  Nucleic Acid
  misc_feature: DNAzyme
gcgcatggggctagctacaacgagtgatcag

SEQ ID NO: 13203 - DNA, 31 bp, Artificial Sequence
  Description of Artificial Sequence:  Nucleic Acid
  misc_feature: DNAzyme
gcagcgcaggctagctacaacgaggcgtgat

SEQ ID NO: 13204 - DNA, 31 bp, Artificial Sequence
  Description of Artificial Sequence:  Nucleic Acid
  misc_feature: DNAzyme
ccgcagcgggctagctacaacgaatggcgtg

SEQ ID NO: 13205 - DNA, 31 bp, Artificial Sequence
  Description of Artificial Sequence:  Nucleic Acid
  misc_feature: DNAzyme
ctccgcagggctagctacaacgagcatggcg

SEQ ID NO: 13206 - DNA, 31 bp, Artificial Sequence
  Description of Artificial Sequence:  Nucleic Acid
  misc_feature: DNAzyme
ttcctccgggctagctacaacgaagcgcatg

SEQ ID NO: 13207 - DNA, 31 bp, Artificial Sequence
  Description of Artificial Sequence:  Nucleic Acid
  misc_feature: DNAzyme
gcaacttgggctagctacaacgatttcctcc

SEQ ID NO: 13208 - DNA, 31 bp, Artificial Sequence
  Description of Artificial Sequence:  Nucleic Acid
  misc_feature: DNAzyme
atgggcaaggctagctacaacgattgctttc

SEQ ID NO: 13209 - DNA, 31 bp, Artificial Sequence
  Description of Artificial Sequence:  Nucleic Acid
  misc_feature: DNAzyme
ttgatgggggctagctacaacgaaacttgct

SEQ ID NO: 13210 - DNA, 31 bp, Artificial Sequence
  Description of Artificial Sequence:  Nucleic Acid
  misc_feature: DNAzyme
cgcgttgaggctagctacaacgagggcaact

SEQ ID NO: 13211 - DNA, 31 bp, Artificial Sequence
  Description of Artificial Sequence:  Nucleic Acid
  misc_feature: DNAzyme
tcaacgcgggctagctacaacgatgatgggc

SEQ ID NO: 13212 - DNA, 31 bp, Artificial Sequence
  Description of Artificial Sequence:  Nucleic Acid
  misc_feature: DNAzyme
gctcaacgggctagctacaacgagttgatgg

SEQ ID NO: 13213 - DNA, 31 bp, Artificial Sequence
  Description of Artificial Sequence:  Nucleic Acid
  misc_feature: DNAzyme
ttgctcaaggctagctacaacgagcgttgat

SEQ ID NO: 13214 - DNA, 31 bp, Artificial Sequence
  Description of Artificial Sequence:  Nucleic Acid
  misc_feature: DNAzyme
aagagttgggctagctacaacgatcaacgcg

SEQ ID NO: 13215 - DNA, 31 bp, Artificial Sequence
  Description of Artificial Sequence:  Nucleic Acid
  misc_feature: DNAzyme
gcaaagagggctagctacaacgatgctcaac

SEQ ID NO: 13216 - DNA, 31 bp, Artificial Sequence
  Description of Artificial Sequence:  Nucleic Acid
  misc_feature: DNAzyme
tgacgcagggctagctacaacgaaaagagtt

SEQ ID NO: 13217 - DNA, 31 bp, Artificial Sequence
  Description of Artificial Sequence:  Nucleic Acid
  misc_feature: DNAzyme
tggtgacgggctagctacaacgaagcaaaga

SEQ ID NO: 13218 - DNA, 31 bp, Artificial Sequence
  Description of Artificial Sequence:  Nucleic Acid
  misc_feature: DNAzyme
tgtggtgaggctagctacaacgagcagcaaa

SEQ ID NO: 13219 - DNA, 31 bp, Artificial Sequence
  Description of Artificial Sequence:  Nucleic Acid
  misc_feature: DNAzyme
tgttgtggggctagctacaacgagacgcagc

SEQ ID NO: 13220 - DNA, 31 bp, Artificial Sequence
  Description of Artificial Sequence:  Nucleic Acid
  misc_feature: DNAzyme
ccatgttgggctagctacaacgaggtgacgc

SEQ ID NO: 13221 - DNA, 31 bp, Artificial Sequence
  Description of Artificial Sequence:  Nucleic Acid
  misc_feature: DNAzyme
agaccatgggctagctacaacgatgtggtga

SEQ ID NO: 13222 - DNA, 31 bp, Artificial Sequence
  Description of Artificial Sequence:  Nucleic Acid
  misc_feature: DNAzyme
gtagaccaggctagctacaacgagttgtggt

SEQ ID NO: 13223 - DNA, 31 bp, Artificial Sequence
  Description of Artificial Sequence:  Nucleic Acid
  misc_feature: DNAzyme
agcgtagaggctagctacaacgacatgttgt

SEQ ID NO: 13224 - DNA, 31 bp, Artificial Sequence
  Description of Artificial Sequence:  Nucleic Acid
  misc_feature: DNAzyme
ttgtagcgggctagctacaacgaagaccatg

SEQ ID NO: 13225 - DNA, 31 bp, Artificial Sequence
  Description of Artificial Sequence:  Nucleic Acid
  misc_feature: DNAzyme
tgttgtagggctagctacaacgagtagacca

SEQ ID NO: 13226 - DNA, 31 bp, Artificial Sequence
  Description of Artificial Sequence:  Nucleic Acid
  misc_feature: DNAzyme
agatgttgggctagctacaacgaagcgtaga

SEQ ID NO: 13227 - DNA, 31 bp, Artificial Sequence
  Description of Artificial Sequence:  Nucleic Acid
  misc_feature: DNAzyme
gcgagatgggctagctacaacgatgtagcgt

SEQ ID NO: 13228 - DNA, 31 bp, Artificial Sequence
  Description of Artificial Sequence:  Nucleic Acid
  misc_feature: DNAzyme
ctgcgagaggctagctacaacgagttgtagc

SEQ ID NO: 13229 - DNA, 31 bp, Artificial Sequence
  Description of Artificial Sequence:  Nucleic Acid
  misc_feature: DNAzyme
ttgcgctgggctagctacaacgagagatgtt

SEQ ID NO: 13230 - DNA, 31 bp, Artificial Sequence
  Description of Artificial Sequence:  Nucleic Acid
  misc_feature: DNAzyme
ggcttgcgggctagctacaacgatgcgagat

SEQ ID NO: 13231 - DNA, 31 bp, Artificial Sequence
  Description of Artificial Sequence:  Nucleic Acid
  misc_feature: DNAzyme
ctggcttgggctagctacaacgagctgcgag

SEQ ID NO: 13232 - DNA, 31 bp, Artificial Sequence
  Description of Artificial Sequence:  Nucleic Acid
  misc_feature: DNAzyme
gccgctggggctagctacaacgattgcgctg

SEQ ID NO: 13233 - DNA, 31 bp, Artificial Sequence
  Description of Artificial Sequence:  Nucleic Acid
  misc_feature: DNAzyme
ttctgccgggctagctacaacgatggcttgc

SEQ ID NO: 13234 - DNA, 31 bp, Artificial Sequence
  Description of Artificial Sequence:  Nucleic Acid
  misc_feature: DNAzyme
ttcttctgggctagctacaacgacgctggct

SEQ ID NO: 13235 - DNA, 31 bp, Artificial Sequence
  Description of Artificial Sequence:  Nucleic Acid
  misc_feature: DNAzyme
aaaggtgaggctagctacaacgacttcttct

SEQ ID NO: 13236 - DNA, 31 bp, Artificial Sequence
  Description of Artificial Sequence:  Nucleic Acid
  misc_feature: DNAzyme
gtcaaaggggctagctacaacgagaccttct

SEQ ID NO: 13237 - DNA, 31 bp, Artificial Sequence
  Description of Artificial Sequence:  Nucleic Acid
  misc_feature: DNAzyme
gcagtctgggctagctacaacgacaaaggtg

SEQ ID NO: 13238 - DNA, 31 bp, Artificial Sequence
  Description of Artificial Sequence:  Nucleic Acid
  misc_feature: DNAzyme
acttgcagggctagctacaacgactgtcaaa

SEQ ID NO: 13239 - DNA, 31 bp, Artificial Sequence
  Description of Artificial Sequence:  Nucleic Acid
  misc_feature: DNAzyme
aggacttgggctagctacaacgaagtctgtc

SEQ ID NO: 13240 - DNA, 31 bp, Artificial Sequence
  Description of Artificial Sequence:  Nucleic Acid
  misc_feature: DNAzyme
gtccaggaggctagctacaacgattgcagtc

SEQ ID NO: 13241 - DNA, 31 bp, Artificial Sequence
  Description of Artificial Sequence:  Nucleic Acid
  misc_feature: DNAzyme
agtggtcgggctagctacaacgaccaggact

SEQ ID NO: 13242 - DNA, 31 bp, Artificial Sequence
  Description of Artificial Sequence:  Nucleic Acid
  misc_feature: DNAzyme
ggtagtggggctagctacaacgacgtccagg

SEQ ID NO: 13243 - DNA, 31 bp, Artificial Sequence
  Description of Artificial Sequence:  Nucleic Acid
  misc_feature: DNAzyme
cccggtagggctagctacaacgaggtcgtcc

SEQ ID NO: 13244 - DNA, 31 bp, Artificial Sequence
  Description of Artificial Sequence:  Nucleic Acid
  misc_feature: DNAzyme
cgtcccggggctagctacaacgaagtggtcg

SEQ ID NO: 13245 - DNA, 31 bp, Artificial Sequence
  Description of Artificial Sequence:  Nucleic Acid
  misc_feature: DNAzyme
tgagcacgggctagctacaacgacccggtag

SEQ ID NO: 13246 - DNA, 31 bp, Artificial Sequence
  Description of Artificial Sequence:  Nucleic Acid
  misc_feature: DNAzyme
cttgagcaggctagctacaacgagtcccggt

SEQ ID NO: 13247 - DNA, 31 bp, Artificial Sequence
  Description of Artificial Sequence:  Nucleic Acid
  misc_feature: DNAzyme
tccttgagggctagctacaacgaacgtcccg

SEQ ID NO: 13248 - DNA, 31 bp, Artificial Sequence
  Description of Artificial Sequence:  Nucleic Acid
  misc_feature: DNAzyme
cgccttcaggctagctacaacgactccttga

SEQ ID NO: 13249 - DNA, 31 bp, Artificial Sequence
  Description of Artificial Sequence:  Nucleic Acid
  misc_feature: DNAzyme
cgccttcgggctagctacaacgacttcatct

SEQ ID NO: 13250 - DNA, 31 bp, Artificial Sequence
  Description of Artificial Sequence:  Nucleic Acid
  misc_feature: DNAzyme
tgtggacgggctagctacaacgacttcgcct

SEQ ID NO: 13251 - DNA, 31 bp, Artificial Sequence
  Description of Artificial Sequence:  Nucleic Acid
  misc_feature: DNAzyme
actgtggaggctagctacaacgagccttcgc

SEQ ID NO: 13252 - DNA, 31 bp, Artificial Sequence
  Description of Artificial Sequence:  Nucleic Acid
  misc_feature: DNAzyme
cttaactgggctagctacaacgaggacgcct

SEQ ID NO: 13253 - DNA, 31 bp, Artificial Sequence
  Description of Artificial Sequence:  Nucleic Acid
  misc_feature: DNAzyme
agccttaaggctagctacaacgatgtggacg

SEQ ID NO: 13254 - DNA, 31 bp, Artificial Sequence
  Description of Artificial Sequence:  Nucleic Acid
  misc_feature: DNAzyme
aagtttagggctagctacaacgacttaactg

SEQ ID NO: 13255 - DNA, 31 bp, Artificial Sequence
  Description of Artificial Sequence:  Nucleic Acid
  misc_feature: DNAzyme
gatagaagggctagctacaacgattagcctt

SEQ ID NO: 13256 - DNA, 31 bp, Artificial Sequence
  Description of Artificial Sequence:  Nucleic Acid
  misc_feature: DNAzyme
tctacggaggctagctacaacgaagaagttt

SEQ ID NO: 13257 - DNA, 31 bp, Artificial Sequence
  Description of Artificial Sequence:  Nucleic Acid
  misc_feature: DNAzyme
ttcctctaggctagctacaacgaggatagaa

SEQ ID NO: 13258 - DNA, 31 bp, Artificial Sequence
  Description of Artificial Sequence:  Nucleic Acid
  misc_feature: DNAzyme
tctgcaggggctagctacaacgattcctcta

SEQ ID NO: 13259 - DNA, 31 bp, Artificial Sequence
  Description of Artificial Sequence:  Nucleic Acid
  misc_feature: DNAzyme
tcagtctgggctagctacaacgaaggcttcc

SEQ ID NO: 13260 - DNA, 31 bp, Artificial Sequence
  Description of Artificial Sequence:  Nucleic Acid
  misc_feature: DNAzyme
ggcgtcagggctagctacaacgactgcaggc

SEQ ID NO: 13261 - DNA, 31 bp, Artificial Sequence
  Description of Artificial Sequence:  Nucleic Acid
  misc_feature: DNAzyme
tgggggcgggctagctacaacgacagtctgc

SEQ ID NO: 13262 - DNA, 31 bp, Artificial Sequence
  Description of Artificial Sequence:  Nucleic Acid
  misc_feature: DNAzyme
tgtgggggggctagctacaacgagtcagtct

SEQ ID NO: 13263 - DNA, 31 bp, Artificial Sequence
  Description of Artificial Sequence:  Nucleic Acid
  misc_feature: DNAzyme
gccgaatgggctagctacaacgagggggcgt

SEQ ID NO: 13264 - DNA, 31 bp, Artificial Sequence
  Description of Artificial Sequence:  Nucleic Acid
  misc_feature: DNAzyme
tggccgaaggctagctacaacgagtgggggc

SEQ ID NO: 13265 - DNA, 31 bp, Artificial Sequence
  Description of Artificial Sequence:  Nucleic Acid
  misc_feature: DNAzyme
ggacctggggctagctacaacgacgaatgtg

SEQ ID NO: 13266 - DNA, 31 bp, Artificial Sequence
  Description of Artificial Sequence:  Nucleic Acid
  misc_feature: DNAzyme
aatttggaggctagctacaacgactggccga

SEQ ID NO: 13267 - DNA, 31 bp, Artificial Sequence
  Description of Artificial Sequence:  Nucleic Acid
  misc_feature: DNAzyme
taaccaaaggctagctacaacgattggacct

SEQ ID NO: 13268 - DNA, 31 bp, Artificial Sequence
  Description of Artificial Sequence:  Nucleic Acid
  misc_feature: DNAzyme
ccccataaggctagctacaacgacaaatttg

SEQ ID NO: 13269 - DNA, 31 bp, Artificial Sequence
  Description of Artificial Sequence:  Nucleic Acid
  misc_feature: DNAzyme
ttgccccaggctagctacaacgaaaccaaat

SEQ ID NO: 13270 - DNA, 31 bp, Artificial Sequence
  Description of Artificial Sequence:  Nucleic Acid
  misc_feature: DNAzyme
gtcctttgggctagctacaacgacccataac

SEQ ID NO: 13271 - DNA, 31 bp, Artificial Sequence
  Description of Artificial Sequence:  Nucleic Acid
  misc_feature: DNAzyme
tccggacgggctagctacaacgacctttgcc

SEQ ID NO: 13272 - DNA, 31 bp, Artificial Sequence
  Description of Artificial Sequence:  Nucleic Acid
  misc_feature: DNAzyme
gttccggaggctagctacaacgagtcctttg

SEQ ID NO: 13273 - DNA, 31 bp, Artificial Sequence
  Description of Artificial Sequence:  Nucleic Acid
  misc_feature: DNAzyme
tggataggggctagctacaacgatccggacg

SEQ ID NO: 13274 - DNA, 31 bp, Artificial Sequence
  Description of Artificial Sequence:  Nucleic Acid
  misc_feature: DNAzyme
ccgctggaggctagctacaacgaaggttccg

SEQ ID NO: 13275 - DNA, 31 bp, Artificial Sequence
  Description of Artificial Sequence:  Nucleic Acid
  misc_feature: DNAzyme
cggccccgggctagctacaacgatggatagg

SEQ ID NO: 13276 - DNA, 31 bp, Artificial Sequence
  Description of Artificial Sequence:  Nucleic Acid
  misc_feature: DNAzyme
gttgacggggctagctacaacgacccgctgg

SEQ ID NO: 13277 - DNA, 31 bp, Artificial Sequence
  Description of Artificial Sequence:  Nucleic Acid
  misc_feature: DNAzyme
gtggttgaggctagctacaacgaggccccgc

SEQ ID NO: 13278 - DNA, 31 bp, Artificial Sequence
  Description of Artificial Sequence:  Nucleic Acid
  misc_feature: DNAzyme
ggatgtggggctagctacaacgatgacggcc

SEQ ID NO: 13279 - DNA, 31 bp, Artificial Sequence
  Description of Artificial Sequence:  Nucleic Acid
  misc_feature: DNAzyme
agcggatgggctagctacaacgaggttgacg

SEQ ID NO: 13280 - DNA, 31 bp, Artificial Sequence
  Description of Artificial Sequence:  Nucleic Acid
  misc_feature: DNAzyme
ggagcggaggctagctacaacgagtggttga

SEQ ID NO: 13281 - DNA, 31 bp, Artificial Sequence
  Description of Artificial Sequence:  Nucleic Acid
  misc_feature: DNAzyme
acacggagggctagctacaacgaggatgtgg

SEQ ID NO: 13282 - DNA, 31 bp, Artificial Sequence
  Description of Artificial Sequence:  Nucleic Acid
  misc_feature: DNAzyme
cttccacaggctagctacaacgaggagcgga

SEQ ID NO: 13283 - DNA, 31 bp, Artificial Sequence
  Description of Artificial Sequence:  Nucleic Acid
  misc_feature: DNAzyme
tccttccaggctagctacaacgaacggagcg

SEQ ID NO: 13284 - DNA, 31 bp, Artificial Sequence
  Description of Artificial Sequence:  Nucleic Acid
  misc_feature: DNAzyme
ccagcaagggctagctacaacgaccttccac

SEQ ID NO: 13285 - DNA, 31 bp, Artificial Sequence
  Description of Artificial Sequence:  Nucleic Acid
  misc_feature: DNAzyme
tcttccagggctagctacaacgaaagtcctt

SEQ ID NO: 13286 - DNA, 31 bp, Artificial Sequence
  Description of Artificial Sequence:  Nucleic Acid
  misc_feature: DNAzyme
tctcagtgggctagctacaacgacttccagc

SEQ ID NO: 13287 - DNA, 31 bp, Artificial Sequence
  Description of Artificial Sequence:  Nucleic Acid
  misc_feature: DNAzyme
tgtctcagggctagctacaacgagtcttcca

SEQ ID NO: 13288 - DNA, 31 bp, Artificial Sequence
  Description of Artificial Sequence:  Nucleic Acid
  misc_feature: DNAzyme
aattggtgggctagctacaacgactcagtgt

SEQ ID NO: 13289 - DNA, 31 bp, Artificial Sequence
  Description of Artificial Sequence:  Nucleic Acid
  misc_feature: DNAzyme
tcaattggggctagctacaacgagtctcagt

SEQ ID NO: 13290 - DNA, 31 bp, Artificial Sequence
  Description of Artificial Sequence:  Nucleic Acid
  misc_feature: DNAzyme
ggtatcaaggctagctacaacgatggtgtct

SEQ ID NO: 13291 - DNA, 31 bp, Artificial Sequence
  Description of Artificial Sequence:  Nucleic Acid
  misc_feature: DNAzyme
tggtggtaggctagctacaacgacaattggt

SEQ ID NO: 13292 - DNA, 31 bp, Artificial Sequence
  Description of Artificial Sequence:  Nucleic Acid
  misc_feature: DNAzyme
gatggtggggctagctacaacgaatcaattg

SEQ ID NO: 13293 - DNA, 31 bp, Artificial Sequence
  Description of Artificial Sequence:  Nucleic Acid
  misc_feature: DNAzyme
catgatggggctagctacaacgaggtatcaa

SEQ ID NO: 13294 - DNA, 31 bp, Artificial Sequence
  Description of Artificial Sequence:  Nucleic Acid
  misc_feature: DNAzyme
tgccatgaggctagctacaacgaggtggtat

SEQ ID NO: 13295 - DNA, 31 bp, Artificial Sequence
  Description of Artificial Sequence:  Nucleic Acid
  misc_feature: DNAzyme
ttttgccaggctagctacaacgagatggtgg

SEQ ID NO: 13296 - DNA, 31 bp, Artificial Sequence
  Description of Artificial Sequence:  Nucleic Acid
  misc_feature: DNAzyme
attttttgggctagctacaacgacatgatgg

SEQ ID NO: 13297 - DNA, 31 bp, Artificial Sequence
  Description of Artificial Sequence:  Nucleic Acid
  misc_feature: DNAzyme
aaacctcaggctagctacaacgatttttgcc

SEQ ID NO: 13298 - DNA, 31 bp, Artificial Sequence
  Description of Artificial Sequence:  Nucleic Acid
  misc_feature: DNAzyme
gcagaaaaggctagctacaacgactcatttt

SEQ ID NO: 13299 - DNA, 31 bp, Artificial Sequence
  Description of Artificial Sequence:  Nucleic Acid
  misc_feature: DNAzyme
gttggacgggctagctacaacgaagaaaacc

SEQ ID NO: 13300 - DNA, 31 bp, Artificial Sequence
  Description of Artificial Sequence:  Nucleic Acid
  misc_feature: DNAzyme
tggttggaggctagctacaacgagcagaaaa

SEQ ID NO: 13301 - DNA, 31 bp, Artificial Sequence
  Description of Artificial Sequence:  Nucleic Acid
  misc_feature: DNAzyme
ttctctggggctagctacaacgatggacgca

SEQ ID NO: 13302 - DNA, 31 bp, Artificial Sequence
  Description of Artificial Sequence:  Nucleic Acid
  misc_feature: DNAzyme
gcttgcggggctagctacaacgactcctttc

SEQ ID NO: 13303 - DNA, 31 bp, Artificial Sequence
  Description of Artificial Sequence:  Nucleic Acid
  misc_feature: DNAzyme
ctggcttgggctagctacaacgaggcctcct

SEQ ID NO: 13304 - DNA, 31 bp, Artificial Sequence
  Description of Artificial Sequence:  Nucleic Acid
  misc_feature: DNAzyme
cgagctggggctagctacaacgattgcggcc

SEQ ID NO: 13305 - DNA, 31 bp, Artificial Sequence
  Description of Artificial Sequence:  Nucleic Acid
  misc_feature: DNAzyme
aaggcgagggctagctacaacgatggcttgc

SEQ ID NO: 13306 - DNA, 31 bp, Artificial Sequence
  Description of Artificial Sequence:  Nucleic Acid
  misc_feature: DNAzyme
cgataaggggctagctacaacgagagctggc

SEQ ID NO: 13307 - DNA, 31 bp, Artificial Sequence
  Description of Artificial Sequence:  Nucleic Acid
  misc_feature: DNAzyme
gaacacgaggctagctacaacgaaaggcgag

SEQ ID NO: 13308 - DNA, 31 bp, Artificial Sequence
  Description of Artificial Sequence:  Nucleic Acid
  misc_feature: DNAzyme
tgggaacaggctagctacaacgagataaggc

SEQ ID NO: 13309 - DNA, 31 bp, Artificial Sequence
  Description of Artificial Sequence:  Nucleic Acid
  misc_feature: DNAzyme
tctgggaaggctagctacaacgaacgataag

SEQ ID NO: 13310 - DNA, 31 bp, Artificial Sequence
  Description of Artificial Sequence:  Nucleic Acid
  misc_feature: DNAzyme
cccccaagggctagctacaacgactgggaac

SEQ ID NO: 13311 - DNA, 31 bp, Artificial Sequence
  Description of Artificial Sequence:  Nucleic Acid
  misc_feature: DNAzyme
cacacgaaggctagctacaacgaccccaagt

SEQ ID NO: 13312 - DNA, 31 bp, Artificial Sequence
  Description of Artificial Sequence:  Nucleic Acid
  misc_feature: DNAzyme
cgcacacaggctagctacaacgagaaccccc

SEQ ID NO: 13313 - DNA, 31 bp, Artificial Sequence
  Description of Artificial Sequence:  Nucleic Acid
  misc_feature: DNAzyme
ctcgcacaggctagctacaacgaacgaaccc

SEQ ID NO: 13314 - DNA, 31 bp, Artificial Sequence
  Description of Artificial Sequence:  Nucleic Acid
  misc_feature: DNAzyme
ttctcgcaggctagctacaacgaacacgaac

SEQ ID NO: 13315 - DNA, 31 bp, Artificial Sequence
  Description of Artificial Sequence:  Nucleic Acid
  misc_feature: DNAzyme
ttttctcgggctagctacaacgaacacacga

SEQ ID NO: 13316 - DNA, 31 bp, Artificial Sequence
  Description of Artificial Sequence:  Nucleic Acid
  misc_feature: DNAzyme
aagggccaggctagctacaacgatttctcgc

SEQ ID NO: 13317 - DNA, 31 bp, Artificial Sequence
  Description of Artificial Sequence:  Nucleic Acid
  misc_feature: DNAzyme
gtaaagggggctagctacaacgacattttct

SEQ ID NO: 13318 - DNA, 31 bp, Artificial Sequence
  Description of Artificial Sequence:  Nucleic Acid
  misc_feature: DNAzyme
ccacgtcgggctagctacaacgaaaagggcc

SEQ ID NO: 13319 - DNA, 31 bp, Artificial Sequence
  Description of Artificial Sequence:  Nucleic Acid
  misc_feature: DNAzyme
agaccacgggctagctacaacgacgtaaagg

SEQ ID NO: 13320 - DNA, 31 bp, Artificial Sequence
  Description of Artificial Sequence:  Nucleic Acid
  misc_feature: DNAzyme
ggagaccaggctagctacaacgagtcgtaaa

SEQ ID NO: 13321 - DNA, 31 bp, Artificial Sequence
  Description of Artificial Sequence:  Nucleic Acid
  misc_feature: DNAzyme
ggtggagaggctagctacaacgacacgtcgt

SEQ ID NO: 13322 - DNA, 31 bp, Artificial Sequence
  Description of Artificial Sequence:  Nucleic Acid
  misc_feature: DNAzyme
aggaagggggctagctacaacgaggagacca

SEQ ID NO: 13323 - DNA, 31 bp, Artificial Sequence
  Description of Artificial Sequence:  Nucleic Acid
  misc_feature: DNAzyme
catcacggggctagctacaacgactgaggaa

SEQ ID NO: 13324 - DNA, 31 bp, Artificial Sequence
  Description of Artificial Sequence:  Nucleic Acid
  misc_feature: DNAzyme
gcccatcaggctagctacaacgaggcctgag

SEQ ID NO: 13325 - DNA, 31 bp, Artificial Sequence
  Description of Artificial Sequence:  Nucleic Acid
  misc_feature: DNAzyme
agagcccaggctagctacaacgacacggcct

SEQ ID NO: 13326 - DNA, 31 bp, Artificial Sequence
  Description of Artificial Sequence:  Nucleic Acid
  misc_feature: DNAzyme
atgaagagggctagctacaacgaccatcacg

SEQ ID NO: 13327 - DNA, 31 bp, Artificial Sequence
  Description of Artificial Sequence:  Nucleic Acid
  misc_feature: DNAzyme
aatccgtaggctagctacaacgagaagagcc

SEQ ID NO: 13328 - DNA, 31 bp, Artificial Sequence
  Description of Artificial Sequence:  Nucleic Acid
  misc_feature: DNAzyme
ggaatccgggctagctacaacgaatgaagag

SEQ ID NO: 13329 - DNA, 31 bp, Artificial Sequence
  Description of Artificial Sequence:  Nucleic Acid
  misc_feature: DNAzyme
tactggaaggctagctacaacgaccgtatga

SEQ ID NO: 13330 - DNA, 31 bp, Artificial Sequence
  Description of Artificial Sequence:  Nucleic Acid
  misc_feature: DNAzyme
ggagagtaggctagctacaacgatggaatcc

SEQ ID NO: 13331 - DNA, 31 bp, Artificial Sequence
  Description of Artificial Sequence:  Nucleic Acid
  misc_feature: DNAzyme
caggagagggctagctacaacgaactggaat

SEQ ID NO: 13332 - DNA, 31 bp, Artificial Sequence
  Description of Artificial Sequence:  Nucleic Acid
  misc_feature: DNAzyme
acccgctgggctagctacaacgaccaggaga

SEQ ID NO: 13333 - DNA, 31 bp, Artificial Sequence
  Description of Artificial Sequence:  Nucleic Acid
  misc_feature: DNAzyme
tcaacccgggctagctacaacgatgcccagg

SEQ ID NO: 13334 - DNA, 31 bp, Artificial Sequence
  Description of Artificial Sequence:  Nucleic Acid
  misc_feature: DNAzyme
gaactcaaggctagctacaacgaccgctgcc

SEQ ID NO: 13335 - DNA, 31 bp, Artificial Sequence
  Description of Artificial Sequence:  Nucleic Acid
  misc_feature: DNAzyme
accaggaaggctagctacaacgatcaacccg

SEQ ID NO: 13336 - DNA, 31 bp, Artificial Sequence
  Description of Artificial Sequence:  Nucleic Acid
  misc_feature: DNAzyme
ggcattcaggctagctacaacgacaggaact

SEQ ID NO: 13337 - DNA, 31 bp, Artificial Sequence
  Description of Artificial Sequence:  Nucleic Acid
  misc_feature: DNAzyme
tccaggcaggctagctacaacgatcaccagg

SEQ ID NO: 13338 - DNA, 31 bp, Artificial Sequence
  Description of Artificial Sequence:  Nucleic Acid
  misc_feature: DNAzyme
tttccaggggctagctacaacgaattcacca

SEQ ID NO: 13339 - DNA, 31 bp, Artificial Sequence
  Description of Artificial Sequence:  Nucleic Acid
  misc_feature: DNAzyme
ttctttgaggctagctacaacgattccaggc

SEQ ID NO: 13340 - DNA, 31 bp, Artificial Sequence
  Description of Artificial Sequence:  Nucleic Acid
  misc_feature: DNAzyme
atagggcaggctagctacaacgattctttga

SEQ ID NO: 13341 - DNA, 31 bp, Artificial Sequence
  Description of Artificial Sequence:  Nucleic Acid
  misc_feature: DNAzyme
ccatagggggctagctacaacgaatttcttt

SEQ ID NO: 13342 - DNA, 31 bp, Artificial Sequence
  Description of Artificial Sequence:  Nucleic Acid
  misc_feature: DNAzyme
aaagcccaggctagctacaacgaagggcatt

SEQ ID NO: 13343 - DNA, 31 bp, Artificial Sequence
  Description of Artificial Sequence:  Nucleic Acid
  misc_feature: DNAzyme
atgcaaagggctagctacaacgaccataggg

SEQ ID NO: 13344 - DNA, 31 bp, Artificial Sequence
  Description of Artificial Sequence:  Nucleic Acid
  misc_feature: DNAzyme
gtcatatgggctagctacaacgaaaagccca

SEQ ID NO: 13345 - DNA, 31 bp, Artificial Sequence
  Description of Artificial Sequence:  Nucleic Acid
  misc_feature: DNAzyme
gtgtcataggctagctacaacgagcaaagcc

SEQ ID NO: 13346 - DNA, 31 bp, Artificial Sequence
  Description of Artificial Sequence:  Nucleic Acid
  misc_feature: DNAzyme
gggtgtcaggctagctacaacgaatgcaaag

SEQ ID NO: 13347 - DNA, 31 bp, Artificial Sequence
  Description of Artificial Sequence:  Nucleic Acid
  misc_feature: DNAzyme
agcgggtgggctagctacaacgacatatgca

SEQ ID NO: 13348 - DNA, 31 bp, Artificial Sequence
  Description of Artificial Sequence:  Nucleic Acid
  misc_feature: DNAzyme
acagcgggggctagctacaacgagtcatatg

SEQ ID NO: 13349 - DNA, 31 bp, Artificial Sequence
  Description of Artificial Sequence:  Nucleic Acid
  misc_feature: DNAzyme
cgaaacagggctagctacaacgagggtgtca

SEQ ID NO: 13350 - DNA, 31 bp, Artificial Sequence
  Description of Artificial Sequence:  Nucleic Acid
  misc_feature: DNAzyme
agtcgaaaggctagctacaacgaagcgggtg

SEQ ID NO: 13351 - DNA, 31 bp, Artificial Sequence
  Description of Artificial Sequence:  Nucleic Acid
  misc_feature: DNAzyme
ctgttgagggctagctacaacgacgaaacag

SEQ ID NO: 13352 - DNA, 31 bp, Artificial Sequence
  Description of Artificial Sequence:  Nucleic Acid
  misc_feature: DNAzyme
ggtgactgggctagctacaacgatgagtcga

SEQ ID NO: 13353 - DNA, 31 bp, Artificial Sequence
  Description of Artificial Sequence:  Nucleic Acid
  misc_feature: DNAzyme
ctcggtgaggctagctacaacgatgttgagt

SEQ ID NO: 13354 - DNA, 31 bp, Artificial Sequence
  Description of Artificial Sequence:  Nucleic Acid
  misc_feature: DNAzyme
actctcggggctagctacaacgagactgttg

SEQ ID NO: 13355 - DNA, 31 bp, Artificial Sequence
  Description of Artificial Sequence:  Nucleic Acid
  misc_feature: DNAzyme
ggatgtcaggctagctacaacgatctcggtg

SEQ ID NO: 13356 - DNA, 31 bp, Artificial Sequence
  Description of Artificial Sequence:  Nucleic Acid
  misc_feature: DNAzyme
cacggatgggctagctacaacgacactctcg

SEQ ID NO: 13357 - DNA, 31 bp, Artificial Sequence
  Description of Artificial Sequence:  Nucleic Acid
  misc_feature: DNAzyme
gacacggaggctagctacaacgagtcactct

SEQ ID NO: 13358 - DNA, 31 bp, Artificial Sequence
  Description of Artificial Sequence:  Nucleic Acid
  misc_feature: DNAzyme
cctcgacaggctagctacaacgaggatgtca

SEQ ID NO: 13359 - DNA, 31 bp, Artificial Sequence
  Description of Artificial Sequence:  Nucleic Acid
  misc_feature: DNAzyme
ctcctcgaggctagctacaacgaacggatgt

SEQ ID NO: 13360 - DNA, 31 bp, Artificial Sequence
  Description of Artificial Sequence:  Nucleic Acid
  misc_feature: DNAzyme
taaattgaggctagctacaacgatcctcgac

SEQ ID NO: 13361 - DNA, 31 bp, Artificial Sequence
  Description of Artificial Sequence:  Nucleic Acid
  misc_feature: DNAzyme
ttggtaaaggctagctacaacgatgactcct

SEQ ID NO: 13362 - DNA, 31 bp, Artificial Sequence
  Description of Artificial Sequence:  Nucleic Acid
  misc_feature: DNAzyme
aacattggggctagctacaacgaaaattgac

SEQ ID NO: 13363 - DNA, 31 bp, Artificial Sequence
  Description of Artificial Sequence:  Nucleic Acid
  misc_feature: DNAzyme
tcacaacaggctagctacaacgatggtaaat

SEQ ID NO: 13364 - DNA, 31 bp, Artificial Sequence
  Description of Artificial Sequence:  Nucleic Acid
  misc_feature: DNAzyme
agtcacaaggctagctacaacgaattggtaa

SEQ ID NO: 13365 - DNA, 31 bp, Artificial Sequence
  Description of Artificial Sequence:  Nucleic Acid
  misc_feature: DNAzyme
ccaagtcaggctagctacaacgaaacattgg

SEQ ID NO: 13366 - DNA, 31 bp, Artificial Sequence
  Description of Artificial Sequence:  Nucleic Acid
  misc_feature: DNAzyme
gggccaagggctagctacaacgacacaacat

SEQ ID NO: 13367 - DNA, 31 bp, Artificial Sequence
  Description of Artificial Sequence:  Nucleic Acid
  misc_feature: DNAzyme
ttcgggggggctagctacaacgacaagtcac

SEQ ID NO: 13368 - DNA, 31 bp, Artificial Sequence
  Description of Artificial Sequence:  Nucleic Acid
  misc_feature: DNAzyme
ctgtctggggctagctacaacgattcggggg

SEQ ID NO: 13369 - DNA, 31 bp, Artificial Sequence
  Description of Artificial Sequence:  Nucleic Acid
  misc_feature: DNAzyme
atggcctgggctagctacaacgactggcttc

SEQ ID NO: 13370 - DNA, 31 bp, Artificial Sequence
  Description of Artificial Sequence:  Nucleic Acid
  misc_feature: DNAzyme
ccttatggggctagctacaacgactgtctgg

SEQ ID NO: 13371 - DNA, 31 bp, Artificial Sequence
  Description of Artificial Sequence:  Nucleic Acid
  misc_feature: DNAzyme
cgaccttaggctagctacaacgaggcctgtc

SEQ ID NO: 13372 - DNA, 31 bp, Artificial Sequence
  Description of Artificial Sequence:  Nucleic Acid
  misc_feature: DNAzyme
gtgagcgaggctagctacaacgacttatggc

SEQ ID NO: 13373 - DNA, 31 bp, Artificial Sequence
  Description of Artificial Sequence:  Nucleic Acid
  misc_feature: DNAzyme
tctgtgagggctagctacaacgagaccttat

SEQ ID NO: 13374 - DNA, 31 bp, Artificial Sequence
  Description of Artificial Sequence:  Nucleic Acid
  misc_feature: DNAzyme
ccgctctgggctagctacaacgagagcgacc

SEQ ID NO: 13375 - DNA, 31 bp, Artificial Sequence
  Description of Artificial Sequence:  Nucleic Acid
  misc_feature: DNAzyme
taaagccgggctagctacaacgatctgtgag

SEQ ID NO: 13376 - DNA, 31 bp, Artificial Sequence
  Description of Artificial Sequence:  Nucleic Acid
  misc_feature: DNAzyme
atataaagggctagctacaacgacgctctgt

SEQ ID NO: 13377 - DNA, 31 bp, Artificial Sequence
  Description of Artificial Sequence:  Nucleic Acid
  misc_feature: DNAzyme
ccccgataggctagctacaacgaaaagccgc

SEQ ID NO: 13378 - DNA, 31 bp, Artificial Sequence
  Description of Artificial Sequence:  Nucleic Acid
  misc_feature: DNAzyme
acccccgaggctagctacaacgaataaagcc

SEQ ID NO: 13379 - DNA, 31 bp, Artificial Sequence
  Description of Artificial Sequence:  Nucleic Acid
  misc_feature: DNAzyme
tcagaggaggctagctacaacgaccccgata

SEQ ID NO: 13380 - DNA, 31 bp, Artificial Sequence
  Description of Artificial Sequence:  Nucleic Acid
  misc_feature: DNAzyme
tgaattagggctagctacaacgacagaggac

SEQ ID NO: 13381 - DNA, 31 bp, Artificial Sequence
  Description of Artificial Sequence:  Nucleic Acid
  misc_feature: DNAzyme
cttttgaaggctagctacaacgatagtcaga

SEQ ID NO: 13382 - DNA, 31 bp, Artificial Sequence
  Description of Artificial Sequence:  Nucleic Acid
  misc_feature: DNAzyme
cagttctgggctagctacaacgaccttttga

SEQ ID NO: 13383 - DNA, 31 bp, Artificial Sequence
  Description of Artificial Sequence:  Nucleic Acid
  misc_feature: DNAzyme
aaccgcagggctagctacaacgatctgccct

SEQ ID NO: 13384 - DNA, 31 bp, Artificial Sequence
  Description of Artificial Sequence:  Nucleic Acid
  misc_feature: DNAzyme
gataaccgggctagctacaacgaagttctgc

SEQ ID NO: 13385 - DNA, 31 bp, Artificial Sequence
  Description of Artificial Sequence:  Nucleic Acid
  misc_feature: DNAzyme
ggcgataaggctagctacaacgacgcagttc

SEQ ID NO: 13386 - DNA, 31 bp, Artificial Sequence
  Description of Artificial Sequence:  Nucleic Acid
  misc_feature: DNAzyme
accggcgaggctagctacaacgaaaccgcag

SEQ ID NO: 13387 - DNA, 31 bp, Artificial Sequence
  Description of Artificial Sequence:  Nucleic Acid
  misc_feature: DNAzyme
ggcaccggggctagctacaacgagataaccg

SEQ ID NO: 13388 - DNA, 31 bp, Artificial Sequence
  Description of Artificial Sequence:  Nucleic Acid
  misc_feature: DNAzyme
gcgcggcaggctagctacaacgacggcgata

SEQ ID NO: 13389 - DNA, 31 bp, Artificial Sequence
  Description of Artificial Sequence:  Nucleic Acid
  misc_feature: DNAzyme
tcgcgcggggctagctacaacgaaccggcga

SEQ ID NO: 13390 - DNA, 31 bp, Artificial Sequence
  Description of Artificial Sequence:  Nucleic Acid
  misc_feature: DNAzyme
cgctcgcgggctagctacaacgaggcaccgg

SEQ ID NO: 13391 - DNA, 31 bp, Artificial Sequence
  Description of Artificial Sequence:  Nucleic Acid
  misc_feature: DNAzyme
gccgctcgggctagctacaacgagcggcacc

SEQ ID NO: 13392 - DNA, 31 bp, Artificial Sequence
  Description of Artificial Sequence:  Nucleic Acid
  misc_feature: DNAzyme
gcacgccgggctagctacaacgatcgcgcgg

SEQ ID NO: 13393 - DNA, 31 bp, Artificial Sequence
  Description of Artificial Sequence:  Nucleic Acid
  misc_feature: DNAzyme
tcagcacgggctagctacaacgacgctcgcg

SEQ ID NO: 13394 - DNA, 31 bp, Artificial Sequence
  Description of Artificial Sequence:  Nucleic Acid
  misc_feature: DNAzyme
cgtcagcaggctagctacaacgagccgctcg

SEQ ID NO: 13395 - DNA, 31 bp, Artificial Sequence
  Description of Artificial Sequence:  Nucleic Acid
  misc_feature: DNAzyme
gtcgtcagggctagctacaacgaacgccgct

SEQ ID NO: 13396 - DNA, 31 bp, Artificial Sequence
  Description of Artificial Sequence:  Nucleic Acid
  misc_feature: DNAzyme
gctggtcgggctagctacaacgacagcacgc

SEQ ID NO: 13397 - DNA, 31 bp, Artificial Sequence
  Description of Artificial Sequence:  Nucleic Acid
  misc_feature: DNAzyme
acagctggggctagctacaacgacgtcagca

SEQ ID NO: 13398 - DNA, 31 bp, Artificial Sequence
  Description of Artificial Sequence:  Nucleic Acid
  misc_feature: DNAzyme
taccacagggctagctacaacgatggtcgtc

SEQ ID NO: 13399 - DNA, 31 bp, Artificial Sequence
  Description of Artificial Sequence:  Nucleic Acid
  misc_feature: DNAzyme
tattaccaggctagctacaacgaagctggtc

SEQ ID NO: 13400 - DNA, 31 bp, Artificial Sequence
  Description of Artificial Sequence:  Nucleic Acid
  misc_feature: DNAzyme
gggtattaggctagctacaacgacacagctg

SEQ ID NO: 13401 - DNA, 31 bp, Artificial Sequence
  Description of Artificial Sequence:  Nucleic Acid
  misc_feature: DNAzyme
tgagggtaggctagctacaacgataccacag

SEQ ID NO: 13402 - DNA, 31 bp, Artificial Sequence
  Description of Artificial Sequence:  Nucleic Acid
  misc_feature: DNAzyme
tgtgagggggctagctacaacgaattaccac

SEQ ID NO: 13403 - DNA, 31 bp, Artificial Sequence
  Description of Artificial Sequence:  Nucleic Acid
  misc_feature: DNAzyme
gtaacatgggctagctacaacgagagggtat

SEQ ID NO: 13404 - DNA, 31 bp, Artificial Sequence
  Description of Artificial Sequence:  Nucleic Acid
  misc_feature: DNAzyme
aagtaacaggctagctacaacgagtgagggt

SEQ ID NO: 13405 - DNA, 31 bp, Artificial Sequence
  Description of Artificial Sequence:  Nucleic Acid
  misc_feature: DNAzyme
tcaagtaaggctagctacaacgaatgtgagg

SEQ ID NO: 13406 - DNA, 31 bp, Artificial Sequence
  Description of Artificial Sequence:  Nucleic Acid
  misc_feature: DNAzyme
ctttcaagggctagctacaacgaaacatgtg

SEQ ID NO: 13407 - DNA, 31 bp, Artificial Sequence
  Description of Artificial Sequence:  Nucleic Acid
  misc_feature: DNAzyme
cgcagaggggctagctacaacgatttcaagt

SEQ ID NO: 13408 - DNA, 31 bp, Artificial Sequence
  Description of Artificial Sequence:  Nucleic Acid
  misc_feature: DNAzyme
acaggccgggctagctacaacgaagaggctt

SEQ ID NO: 13409 - DNA, 31 bp, Artificial Sequence
  Description of Artificial Sequence:  Nucleic Acid
  misc_feature: DNAzyme
tcgacaggggctagctacaacgacgcagagg

SEQ ID NO: 13410 - DNA, 31 bp, Artificial Sequence
  Description of Artificial Sequence:  Nucleic Acid
  misc_feature: DNAzyme
cagctcgaggctagctacaacgaaggccgca

SEQ ID NO: 13411 - DNA, 31 bp, Artificial Sequence
  Description of Artificial Sequence:  Nucleic Acid
  misc_feature: DNAzyme
cttcgcagggctagctacaacgatcgacagg

SEQ ID NO: 13412 - DNA, 31 bp, Artificial Sequence
  Description of Artificial Sequence:  Nucleic Acid
  misc_feature: DNAzyme
gagcttcgggctagctacaacgaagctcgac

SEQ ID NO: 13413 - DNA, 31 bp, Artificial Sequence
  Description of Artificial Sequence:  Nucleic Acid
  misc_feature: DNAzyme
tcctggagggctagctacaacgattcgcagc

SEQ ID NO: 13414 - DNA, 31 bp, Artificial Sequence
  Description of Artificial Sequence:  Nucleic Acid
  misc_feature: DNAzyme
tcgtgcagggctagctacaacgacctggagc

SEQ ID NO: 13415 - DNA, 31 bp, Artificial Sequence
  Description of Artificial Sequence:  Nucleic Acid
  misc_feature: DNAzyme
gcatcgtgggctagctacaacgaagtcctgg

SEQ ID NO: 13416 - DNA, 31 bp, Artificial Sequence
  Description of Artificial Sequence:  Nucleic Acid
  misc_feature: DNAzyme
gagcatcgggctagctacaacgagcagtcct

SEQ ID NO: 13417 - DNA, 31 bp, Artificial Sequence
  Description of Artificial Sequence:  Nucleic Acid
  misc_feature: DNAzyme
cacgagcaggctagctacaacgacgtgcagt

SEQ ID NO: 13418 - DNA, 31 bp, Artificial Sequence
  Description of Artificial Sequence:  Nucleic Acid
  misc_feature: DNAzyme
cacacgagggctagctacaacgaatcgtgca

SEQ ID NO: 13419 - DNA, 31 bp, Artificial Sequence
  Description of Artificial Sequence:  Nucleic Acid
  misc_feature: DNAzyme
tccacacaggctagctacaacgagagcatcg

SEQ ID NO: 13420 - DNA, 31 bp, Artificial Sequence
  Description of Artificial Sequence:  Nucleic Acid
  misc_feature: DNAzyme
tctccacaggctagctacaacgaacgagcat

SEQ ID NO: 13421 - DNA, 31 bp, Artificial Sequence
  Description of Artificial Sequence:  Nucleic Acid
  misc_feature: DNAzyme
cgtctccaggctagctacaacgaacacgagc

SEQ ID NO: 13422 - DNA, 31 bp, Artificial Sequence
  Description of Artificial Sequence:  Nucleic Acid
  misc_feature: DNAzyme
ccaggtcgggctagctacaacgactccacac

SEQ ID NO: 13423 - DNA, 31 bp, Artificial Sequence
  Description of Artificial Sequence:  Nucleic Acid
  misc_feature: DNAzyme
cgaccaggggctagctacaacgacgtctcca

SEQ ID NO: 13424 - DNA, 31 bp, Artificial Sequence
  Description of Artificial Sequence:  Nucleic Acid
  misc_feature: DNAzyme
gataacgaggctagctacaacgacaggtcgt

SEQ ID NO: 13425 - DNA, 31 bp, Artificial Sequence
  Description of Artificial Sequence:  Nucleic Acid
  misc_feature: DNAzyme
acagataaggctagctacaacgagaccaggt

SEQ ID NO: 13426 - DNA, 31 bp, Artificial Sequence
  Description of Artificial Sequence:  Nucleic Acid
  misc_feature: DNAzyme
ttcacagaggctagctacaacgaaacgacca

SEQ ID NO: 13427 - DNA, 31 bp, Artificial Sequence
  Description of Artificial Sequence:  Nucleic Acid
  misc_feature: DNAzyme
cactttcaggctagctacaacgaagataacg

SEQ ID NO: 13428 - DNA, 31 bp, Artificial Sequence
  Description of Artificial Sequence:  Nucleic Acid
  misc_feature: DNAzyme
tccccgcaggctagctacaacgatttcacag

SEQ ID NO: 13429 - DNA, 31 bp, Artificial Sequence
  Description of Artificial Sequence:  Nucleic Acid
  misc_feature: DNAzyme
ggtccccgggctagctacaacgaactttcac

SEQ ID NO: 13430 - DNA, 31 bp, Artificial Sequence
  Description of Artificial Sequence:  Nucleic Acid
  misc_feature: DNAzyme
ctcttgggggctagctacaacgaccccgcac

SEQ ID NO: 13431 - DNA, 31 bp, Artificial Sequence
  Description of Artificial Sequence:  Nucleic Acid
  misc_feature: DNAzyme
tcgccgcgggctagctacaacgacctcttgg

SEQ ID NO: 13432 - DNA, 31 bp, Artificial Sequence
  Description of Artificial Sequence:  Nucleic Acid
  misc_feature: DNAzyme
gctcgccgggctagctacaacgagtcctctt

SEQ ID NO: 13433 - DNA, 31 bp, Artificial Sequence
  Description of Artificial Sequence:  Nucleic Acid
  misc_feature: DNAzyme
taggctcgggctagctacaacgacgcgtcct

SEQ ID NO: 13434 - DNA, 31 bp, Artificial Sequence
  Description of Artificial Sequence:  Nucleic Acid
  misc_feature: DNAzyme
ctcgtaggggctagctacaacgatcgccgcg

SEQ ID NO: 13435 - DNA, 31 bp, Artificial Sequence
  Description of Artificial Sequence:  Nucleic Acid
  misc_feature: DNAzyme
aagactcgggctagctacaacgaaggctcgc

SEQ ID NO: 13436 - DNA, 31 bp, Artificial Sequence
  Description of Artificial Sequence:  Nucleic Acid
  misc_feature: DNAzyme
cgtgaagaggctagctacaacgatcgtaggc

SEQ ID NO: 13437 - DNA, 31 bp, Artificial Sequence
  Description of Artificial Sequence:  Nucleic Acid
  misc_feature: DNAzyme
agcctccgggctagctacaacgagaagactc

SEQ ID NO: 13438 - DNA, 31 bp, Artificial Sequence
  Description of Artificial Sequence:  Nucleic Acid
  misc_feature: DNAzyme
agtcatagggctagctacaacgactccgtga

SEQ ID NO: 13439 - DNA, 31 bp, Artificial Sequence
  Description of Artificial Sequence:  Nucleic Acid
  misc_feature: DNAzyme
cctagtcaggctagctacaacgaagcctccg

SEQ ID NO: 13440 - DNA, 31 bp, Artificial Sequence
  Description of Artificial Sequence:  Nucleic Acid
  misc_feature: DNAzyme
gtacctagggctagctacaacgacatagcct

SEQ ID NO: 13441 - DNA, 31 bp, Artificial Sequence
  Description of Artificial Sequence:  Nucleic Acid
  misc_feature: DNAzyme
gcagagtaggctagctacaacgactagtcat

SEQ ID NO: 13442 - DNA, 31 bp, Artificial Sequence
  Description of Artificial Sequence:  Nucleic Acid
  misc_feature: DNAzyme
gggcagagggctagctacaacgaacctagtc

SEQ ID NO: 13443 - DNA, 31 bp, Artificial Sequence
  Description of Artificial Sequence:  Nucleic Acid
  misc_feature: DNAzyme
ggggggggggctagctacaacgaagagtacc

SEQ ID NO: 13444 - DNA, 31 bp, Artificial Sequence
  Description of Artificial Sequence:  Nucleic Acid
  misc_feature: DNAzyme
ggggcgggggctagctacaacgaccccgggg

SEQ ID NO: 13445 - DNA, 31 bp, Artificial Sequence
  Description of Artificial Sequence:  Nucleic Acid
  misc_feature: DNAzyme
ggttggggggctagctacaacgagggtcccc

SEQ ID NO: 13446 - DNA, 31 bp, Artificial Sequence
  Description of Artificial Sequence:  Nucleic Acid
  misc_feature: DNAzyme
tattccggggctagctacaacgatggggcgg

SEQ ID NO: 13447 - DNA, 31 bp, Artificial Sequence
  Description of Artificial Sequence:  Nucleic Acid
  misc_feature: DNAzyme
aagtcgtaggctagctacaacgatccggttg

SEQ ID NO: 13448 - DNA, 31 bp, Artificial Sequence
  Description of Artificial Sequence:  Nucleic Acid
  misc_feature: DNAzyme
ccaagtcgggctagctacaacgaattccggt

SEQ ID NO: 13449 - DNA, 31 bp, Artificial Sequence
  Description of Artificial Sequence:  Nucleic Acid
  misc_feature: DNAzyme
actccaagggctagctacaacgacgtattcc

SEQ ID NO: 13450 - DNA, 31 bp, Artificial Sequence
  Description of Artificial Sequence:  Nucleic Acid
  misc_feature: DNAzyme
gttatcaaggctagctacaacgatccaagtc

SEQ ID NO: 13451 - DNA, 31 bp, Artificial Sequence
  Description of Artificial Sequence:  Nucleic Acid
  misc_feature: DNAzyme
tgatgttaggctagctacaacgacaactcca

SEQ ID NO: 13452 - DNA, 31 bp, Artificial Sequence
  Description of Artificial Sequence:  Nucleic Acid
  misc_feature: DNAzyme
gcatgatgggctagctacaacgatatcaact

SEQ ID NO: 13453 - DNA, 31 bp, Artificial Sequence
  Description of Artificial Sequence:  Nucleic Acid
  misc_feature: DNAzyme
gagcatgaggctagctacaacgagttatcaa

SEQ ID NO: 13454 - DNA, 31 bp, Artificial Sequence
  Description of Artificial Sequence:  Nucleic Acid
  misc_feature: DNAzyme
gaggagcaggctagctacaacgagatgttat

SEQ ID NO: 13455 - DNA, 31 bp, Artificial Sequence
  Description of Artificial Sequence:  Nucleic Acid
  misc_feature: DNAzyme
tggaggagggctagctacaacgaatgatgtt

SEQ ID NO: 13456 - DNA, 31 bp, Artificial Sequence
  Description of Artificial Sequence:  Nucleic Acid
  misc_feature: DNAzyme
ctgatacgggctagctacaacgatggaggag

SEQ ID NO: 13457 - DNA, 31 bp, Artificial Sequence
  Description of Artificial Sequence:  Nucleic Acid
  misc_feature: DNAzyme
aactgataggctagctacaacgagttggagg

SEQ ID NO: 13458 - DNA, 31 bp, Artificial Sequence
  Description of Artificial Sequence:  Nucleic Acid
  misc_feature: DNAzyme
gcaactgaggctagctacaacgaacgttgga

SEQ ID NO: 13459 - DNA, 31 bp, Artificial Sequence
  Description of Artificial Sequence:  Nucleic Acid
  misc_feature: DNAzyme
gtgtgcaaggctagctacaacgatgatacgt

SEQ ID NO: 13460 - DNA, 31 bp, Artificial Sequence
  Description of Artificial Sequence:  Nucleic Acid
  misc_feature: DNAzyme
atcgtgtgggctagctacaacgaaactgata

SEQ ID NO: 13461 - DNA, 31 bp, Artificial Sequence
  Description of Artificial Sequence:  Nucleic Acid
  misc_feature: DNAzyme
gcatcgtgggctagctacaacgagcaactga

SEQ ID NO: 13462 - DNA, 31 bp, Artificial Sequence
  Description of Artificial Sequence:  Nucleic Acid
  misc_feature: DNAzyme
atgcatcgggctagctacaacgagtgcaact

SEQ ID NO: 13463 - DNA, 31 bp, Artificial Sequence
  Description of Artificial Sequence:  Nucleic Acid
  misc_feature: DNAzyme
cagatgcaggctagctacaacgacgtgtgca

SEQ ID NO: 13464 - DNA, 31 bp, Artificial Sequence
  Description of Artificial Sequence:  Nucleic Acid
  misc_feature: DNAzyme
gccagatgggctagctacaacgaatcgtgtg

SEQ ID NO: 13465 - DNA, 31 bp, Artificial Sequence
  Description of Artificial Sequence:  Nucleic Acid
  misc_feature: DNAzyme
ttgccagaggctagctacaacgagcatcgtg

SEQ ID NO: 13466 - DNA, 31 bp, Artificial Sequence
  Description of Artificial Sequence:  Nucleic Acid
  misc_feature: DNAzyme
cccttttgggctagctacaacgacagatgca

SEQ ID NO: 13467 - DNA, 31 bp, Artificial Sequence
  Description of Artificial Sequence:  Nucleic Acid
  misc_feature: DNAzyme
gtagtacaggctagctacaacgaccttttgc

SEQ ID NO: 13468 - DNA, 31 bp, Artificial Sequence
  Description of Artificial Sequence:  Nucleic Acid
  misc_feature: DNAzyme
aggtagtaggctagctacaacgaaccctttt

SEQ ID NO: 13469 - DNA, 31 bp, Artificial Sequence
  Description of Artificial Sequence:  Nucleic Acid
  misc_feature: DNAzyme
tgaggtagggctagctacaacgaacaccctt

SEQ ID NO: 13470 - DNA, 31 bp, Artificial Sequence
  Description of Artificial Sequence:  Nucleic Acid
  misc_feature: DNAzyme
gggtgaggggctagctacaacgaagtacacc

SEQ ID NO: 13471 - DNA, 31 bp, Artificial Sequence
  Description of Artificial Sequence:  Nucleic Acid
  misc_feature: DNAzyme
gtcacgggggctagctacaacgagaggtagt

SEQ ID NO: 13472 - DNA, 31 bp, Artificial Sequence
  Description of Artificial Sequence:  Nucleic Acid
  misc_feature: DNAzyme
tggggtcaggctagctacaacgagggtgagg

SEQ ID NO: 13473 - DNA, 31 bp, Artificial Sequence
  Description of Artificial Sequence:  Nucleic Acid
  misc_feature: DNAzyme
tggtggggggctagctacaacgacacgggtg

SEQ ID NO: 13474 - DNA, 31 bp, Artificial Sequence
  Description of Artificial Sequence:  Nucleic Acid
  misc_feature: DNAzyme
gggggtggggctagctacaacgaggggtcac

SEQ ID NO: 13475 - DNA, 31 bp, Artificial Sequence
  Description of Artificial Sequence:  Nucleic Acid
  misc_feature: DNAzyme
aaggggggggctagctacaacgaggtggggt

SEQ ID NO: 13476 - DNA, 31 bp, Artificial Sequence
  Description of Artificial Sequence:  Nucleic Acid
  misc_feature: DNAzyme
agcccgcgggctagctacaacgaaagggggg

SEQ ID NO: 13477 - DNA, 31 bp, Artificial Sequence
  Description of Artificial Sequence:  Nucleic Acid
  misc_feature: DNAzyme
gcagcccgggctagctacaacgagcaagggg

SEQ ID NO: 13478 - DNA, 31 bp, Artificial Sequence
  Description of Artificial Sequence:  Nucleic Acid
  misc_feature: DNAzyme
ccacgcagggctagctacaacgaccgcgcaa

SEQ ID NO: 13479 - DNA, 31 bp, Artificial Sequence
  Description of Artificial Sequence:  Nucleic Acid
  misc_feature: DNAzyme
ctcccacgggctagctacaacgaagcccgcg

SEQ ID NO: 13480 - DNA, 31 bp, Artificial Sequence
  Description of Artificial Sequence:  Nucleic Acid
  misc_feature: DNAzyme
gtctcccaggctagctacaacgagcagcccg

SEQ ID NO: 13481 - DNA, 31 bp, Artificial Sequence
  Description of Artificial Sequence:  Nucleic Acid
  misc_feature: DNAzyme
tctagctgggctagctacaacgactcccacg

SEQ ID NO: 13482 - DNA, 31 bp, Artificial Sequence
  Description of Artificial Sequence:  Nucleic Acid
  misc_feature: DNAzyme
gcttctagggctagctacaacgatgtctccc

SEQ ID NO: 13483 - DNA, 31 bp, Artificial Sequence
  Description of Artificial Sequence:  Nucleic Acid
  misc_feature: DNAzyme
ctggagtgggctagctacaacgattctagct

SEQ ID NO: 13484 - DNA, 31 bp, Artificial Sequence
  Description of Artificial Sequence:  Nucleic Acid
  misc_feature: DNAzyme
gactggagggctagctacaacgagcttctag

SEQ ID NO: 13485 - DNA, 31 bp, Artificial Sequence
  Description of Artificial Sequence:  Nucleic Acid
  misc_feature: DNAzyme
ggagttgaggctagctacaacgatggagtgc

SEQ ID NO: 13486 - DNA, 31 bp, Artificial Sequence
  Description of Artificial Sequence:  Nucleic Acid
  misc_feature: DNAzyme
gccaggagggctagctacaacgatgactgga

SEQ ID NO: 13487 - DNA, 31 bp, Artificial Sequence
  Description of Artificial Sequence:  Nucleic Acid
  misc_feature: DNAzyme
ttgcctagggctagctacaacgacaggagtt

SEQ ID NO: 13488 - DNA, 31 bp, Artificial Sequence
  Description of Artificial Sequence:  Nucleic Acid
  misc_feature: DNAzyme
tgatgttgggctagctacaacgactagccag

SEQ ID NO: 13489 - DNA, 31 bp, Artificial Sequence
  Description of Artificial Sequence:  Nucleic Acid
  misc_feature: DNAzyme
tgatgatgggctagctacaacgatgcctagc

SEQ ID NO: 13490 - DNA, 31 bp, Artificial Sequence
  Description of Artificial Sequence:  Nucleic Acid
  misc_feature: DNAzyme
catgatgaggctagctacaacgagttgccta

SEQ ID NO: 13491 - DNA, 31 bp, Artificial Sequence
  Description of Artificial Sequence:  Nucleic Acid
  misc_feature: DNAzyme
aaacatgaggctagctacaacgagatgttgc

SEQ ID NO: 13492 - DNA, 31 bp, Artificial Sequence
  Description of Artificial Sequence:  Nucleic Acid
  misc_feature: DNAzyme
tgcaaacaggctagctacaacgagatgatgt

SEQ ID NO: 13493 - DNA, 31 bp, Artificial Sequence
  Description of Artificial Sequence:  Nucleic Acid
  misc_feature: DNAzyme
ggtgcaaaggctagctacaacgaatgatgat

SEQ ID NO: 13494 - DNA, 31 bp, Artificial Sequence
  Description of Artificial Sequence:  Nucleic Acid
  misc_feature: DNAzyme
agtgggtgggctagctacaacgaaaacatga

SEQ ID NO: 13495 - DNA, 31 bp, Artificial Sequence
  Description of Artificial Sequence:  Nucleic Acid
  misc_feature: DNAzyme
agagtgggggctagctacaacgagcaaacat

SEQ ID NO: 13496 - DNA, 31 bp, Artificial Sequence
  Description of Artificial Sequence:  Nucleic Acid
  misc_feature: DNAzyme
ccatagagggctagctacaacgagggtgcaa

SEQ ID NO: 13497 - DNA, 31 bp, Artificial Sequence
  Description of Artificial Sequence:  Nucleic Acid
  misc_feature: DNAzyme
cttacccaggctagctacaacgaagagtggg

SEQ ID NO: 13498 - DNA, 31 bp, Artificial Sequence
  Description of Artificial Sequence:  Nucleic Acid
  misc_feature: DNAzyme
catccttaggctagctacaacgaccatagag

SEQ ID NO: 13499 - DNA, 31 bp, Artificial Sequence
  Description of Artificial Sequence:  Nucleic Acid
  misc_feature: DNAzyme
cagaatcaggctagctacaacgaccttaccc

SEQ ID NO: 13500 - DNA, 31 bp, Artificial Sequence
  Description of Artificial Sequence:  Nucleic Acid
  misc_feature: DNAzyme
catcagaaggctagctacaacgacatcctta

SEQ ID NO: 13501 - DNA, 31 bp, Artificial Sequence
  Description of Artificial Sequence:  Nucleic Acid
  misc_feature: DNAzyme
gtgagtcaggctagctacaacgacagaatca

SEQ ID NO: 13502 - DNA, 31 bp, Artificial Sequence
  Description of Artificial Sequence:  Nucleic Acid
  misc_feature: DNAzyme
gaagtgagggctagctacaacgacatcagaa

SEQ ID NO: 13503 - DNA, 31 bp, Artificial Sequence
  Description of Artificial Sequence:  Nucleic Acid
  misc_feature: DNAzyme
agaagaagggctagctacaacgagagtcatc

SEQ ID NO: 13504 - DNA, 31 bp, Artificial Sequence
  Description of Artificial Sequence:  Nucleic Acid
  misc_feature: DNAzyme
tagaaggaggctagctacaacgaggagaaga

SEQ ID NO: 13505 - DNA, 31 bp, Artificial Sequence
  Description of Artificial Sequence:  Nucleic Acid
  misc_feature: DNAzyme
ctcctgggggctagctacaacgatagaagga

SEQ ID NO: 13506 - DNA, 31 bp, Artificial Sequence
  Description of Artificial Sequence:  Nucleic Acid
  misc_feature: DNAzyme
tcaagttgggctagctacaacgatcctgggc

SEQ ID NO: 13507 - DNA, 31 bp, Artificial Sequence
  Description of Artificial Sequence:  Nucleic Acid
  misc_feature: DNAzyme
ttctcaagggctagctacaacgatgctcctg

SEQ ID NO: 13508 - DNA, 31 bp, Artificial Sequence
  Description of Artificial Sequence:  Nucleic Acid
  misc_feature: DNAzyme
gtctagggggctagctacaacgatttctcaa

SEQ ID NO: 13509 - DNA, 31 bp, Artificial Sequence
  Description of Artificial Sequence:  Nucleic Acid
  misc_feature: DNAzyme
tctggcagggctagctacaacgactagggct

SEQ ID NO: 13510 - DNA, 31 bp, Artificial Sequence
  Description of Artificial Sequence:  Nucleic Acid
  misc_feature: DNAzyme
agatctggggctagctacaacgaagtctagg

SEQ ID NO: 13511 - DNA, 31 bp, Artificial Sequence
  Description of Artificial Sequence:  Nucleic Acid
  misc_feature: DNAzyme
cccgtagaggctagctacaacgactggcagt

SEQ ID NO: 13512 - DNA, 31 bp, Artificial Sequence
  Description of Artificial Sequence:  Nucleic Acid
  misc_feature: DNAzyme
aagccccgggctagctacaacgaagatctgg

SEQ ID NO: 13513 - DNA, 31 bp, Artificial Sequence
  Description of Artificial Sequence:  Nucleic Acid
  misc_feature: DNAzyme
gtaacaagggctagctacaacgacccgtaga

SEQ ID NO: 13514 - DNA, 31 bp, Artificial Sequence
  Description of Artificial Sequence:  Nucleic Acid
  misc_feature: DNAzyme
tggagtaaggctagctacaacgaaagccccg

SEQ ID NO: 13515 - DNA, 31 bp, Artificial Sequence
  Description of Artificial Sequence:  Nucleic Acid
  misc_feature: DNAzyme
caatggagggctagctacaacgaaacaagcc

SEQ ID NO: 13516 - DNA, 31 bp, Artificial Sequence
  Description of Artificial Sequence:  Nucleic Acid
  misc_feature: DNAzyme
tggctcaaggctagctacaacgaggagtaac

SEQ ID NO: 13517 - DNA, 31 bp, Artificial Sequence
  Description of Artificial Sequence:  Nucleic Acid
  misc_feature: DNAzyme
tcaagtggggctagctacaacgatcaatgga

SEQ ID NO: 13518 - DNA, 31 bp, Artificial Sequence
  Description of Artificial Sequence:  Nucleic Acid
  misc_feature: DNAzyme
aggtcaagggctagctacaacgaggctcaat

SEQ ID NO: 13519 - DNA, 31 bp, Artificial Sequence
  Description of Artificial Sequence:  Nucleic Acid
  misc_feature: DNAzyme
gaggtaggggctagctacaacgacaagtggc

SEQ ID NO: 13520 - DNA, 31 bp, Artificial Sequence
  Description of Artificial Sequence:  Nucleic Acid
  misc_feature: DNAzyme
atctgaggggctagctacaacgaaggtcaag

SEQ ID NO: 13521 - DNA, 31 bp, Artificial Sequence
  Description of Artificial Sequence:  Nucleic Acid
  misc_feature: DNAzyme
ctgaatgaggctagctacaacgactgaggta

SEQ ID NO: 13522 - DNA, 31 bp, Artificial Sequence
  Description of Artificial Sequence:  Nucleic Acid
  misc_feature: DNAzyme
tcgctgaaggctagctacaacgagatctgag

SEQ ID NO: 13523 - DNA, 31 bp, Artificial Sequence
  Description of Artificial Sequence:  Nucleic Acid
  misc_feature: DNAzyme
tggagtcgggctagctacaacgatgaatgat

SEQ ID NO: 13524 - DNA, 31 bp, Artificial Sequence
  Description of Artificial Sequence:  Nucleic Acid
  misc_feature: DNAzyme
ccatggagggctagctacaacgacgctgaat

SEQ ID NO: 13525 - DNA, 31 bp, Artificial Sequence
  Description of Artificial Sequence:  Nucleic Acid
  misc_feature: DNAzyme
taagaccaggctagctacaacgaggagtcgc

SEQ ID NO: 13526 - DNA, 31 bp, Artificial Sequence
  Description of Artificial Sequence:  Nucleic Acid
  misc_feature: DNAzyme
cgctaagaggctagctacaacgacatggagt

SEQ ID NO: 13527 - DNA, 31 bp, Artificial Sequence
  Description of Artificial Sequence:  Nucleic Acid
  misc_feature: DNAzyme
aaaatgcgggctagctacaacgataagacca

SEQ ID NO: 13528 - DNA, 31 bp, Artificial Sequence
  Description of Artificial Sequence:  Nucleic Acid
  misc_feature: DNAzyme
tgaaaatgggctagctacaacgagctaagac

SEQ ID NO: 13529 - DNA, 31 bp, Artificial Sequence
  Description of Artificial Sequence:  Nucleic Acid
  misc_feature: DNAzyme
agtgaaaaggctagctacaacgagcgctaag

SEQ ID NO: 13530 - DNA, 31 bp, Artificial Sequence
  Description of Artificial Sequence:  Nucleic Acid
  misc_feature: DNAzyme
ctatggagggctagctacaacgagaaaatgc

SEQ ID NO: 13531 - DNA, 31 bp, Artificial Sequence
  Description of Artificial Sequence:  Nucleic Acid
  misc_feature: DNAzyme
agtaactaggctagctacaacgaggagtgaa

SEQ ID NO: 13532 - DNA, 31 bp, Artificial Sequence
  Description of Artificial Sequence:  Nucleic Acid
  misc_feature: DNAzyme
gggagtaaggctagctacaacgatatggagt

SEQ ID NO: 13533 - DNA, 31 bp, Artificial Sequence
  Description of Artificial Sequence:  Nucleic Acid
  misc_feature: DNAzyme
ctggggagggctagctacaacgaaactatgg

SEQ ID NO: 13534 - DNA, 31 bp, Artificial Sequence
  Description of Artificial Sequence:  Nucleic Acid
  misc_feature: DNAzyme
tgatttcaggctagctacaacgactggggag

SEQ ID NO: 13535 - DNA, 31 bp, Artificial Sequence
  Description of Artificial Sequence:  Nucleic Acid
  misc_feature: DNAzyme
cctattgaggctagctacaacgattcacctg

SEQ ID NO: 13536 - DNA, 31 bp, Artificial Sequence
  Description of Artificial Sequence:  Nucleic Acid
  misc_feature: DNAzyme
ccaccctaggctagctacaacgatgatttca

SEQ ID NO: 13537 - DNA, 31 bp, Artificial Sequence
  Description of Artificial Sequence:  Nucleic Acid
  misc_feature: DNAzyme
tgatgccaggctagctacaacgacctattga

SEQ ID NO: 13538 - DNA, 31 bp, Artificial Sequence
  Description of Artificial Sequence:  Nucleic Acid
  misc_feature: DNAzyme
gcatgatgggctagctacaacgacaccctat

SEQ ID NO: 13539 - DNA, 31 bp, Artificial Sequence
  Description of Artificial Sequence:  Nucleic Acid
  misc_feature: DNAzyme
aggcatgaggctagctacaacgagccaccct

SEQ ID NO: 13540 - DNA, 31 bp, Artificial Sequence
  Description of Artificial Sequence:  Nucleic Acid
  misc_feature: DNAzyme
ctgaggcaggctagctacaacgagatgccac

SEQ ID NO: 13541 - DNA, 31 bp, Artificial Sequence
  Description of Artificial Sequence:  Nucleic Acid
  misc_feature: DNAzyme
tcctgaggggctagctacaacgaatgatgcc

SEQ ID NO: 13542 - DNA, 31 bp, Artificial Sequence
  Description of Artificial Sequence:  Nucleic Acid
  misc_feature: DNAzyme
accccaagggctagctacaacgattcctgag

SEQ ID NO: 13543 - DNA, 31 bp, Artificial Sequence
  Description of Artificial Sequence:  Nucleic Acid
  misc_feature: DNAzyme
gggtggtaggctagctacaacgacccaagtt

SEQ ID NO: 13544 - DNA, 31 bp, Artificial Sequence
  Description of Artificial Sequence:  Nucleic Acid
  misc_feature: DNAzyme
aagggtggggctagctacaacgaaccccaag

SEQ ID NO: 13545 - DNA, 31 bp, Artificial Sequence
  Description of Artificial Sequence:  Nucleic Acid
  misc_feature: DNAzyme
cgcaagggggctagctacaacgaggtacccc

SEQ ID NO: 13546 - DNA, 31 bp, Artificial Sequence
  Description of Artificial Sequence:  Nucleic Acid
  misc_feature: DNAzyme
caggttcgggctagctacaacgaaagggtgg

SEQ ID NO: 13547 - DNA, 31 bp, Artificial Sequence
  Description of Artificial Sequence:  Nucleic Acid
  misc_feature: DNAzyme
tctccaggggctagctacaacgatcgcaagg

SEQ ID NO: 13548 - DNA, 31 bp, Artificial Sequence
  Description of Artificial Sequence:  Nucleic Acid
  misc_feature: DNAzyme
gcccgatgggctagctacaacgactccaggt

SEQ ID NO: 13549 - DNA, 31 bp, Artificial Sequence
  Description of Artificial Sequence:  Nucleic Acid
  misc_feature: DNAzyme
tggcccgaggctagctacaacgagtctccag

SEQ ID NO: 13550 - DNA, 31 bp, Artificial Sequence
  Description of Artificial Sequence:  Nucleic Acid
  misc_feature: DNAzyme
acttctggggctagctacaacgaccgatgtc

SEQ ID NO: 13551 - DNA, 31 bp, Artificial Sequence
  Description of Artificial Sequence:  Nucleic Acid
  misc_feature: DNAzyme
cgcgaacaggctagctacaacgattctggcc

SEQ ID NO: 13552 - DNA, 31 bp, Artificial Sequence
  Description of Artificial Sequence:  Nucleic Acid
  misc_feature: DNAzyme
agcgcgaaggctagctacaacgaacttctgg

SEQ ID NO: 13553 - DNA, 31 bp, Artificial Sequence
  Description of Artificial Sequence:  Nucleic Acid
  misc_feature: DNAzyme
gcttagcgggctagctacaacgagaacactt

SEQ ID NO: 13554 - DNA, 31 bp, Artificial Sequence
  Description of Artificial Sequence:  Nucleic Acid
  misc_feature: DNAzyme
tagcttagggctagctacaacgagcgaacac

SEQ ID NO: 13555 - DNA, 31 bp, Artificial Sequence
  Description of Artificial Sequence:  Nucleic Acid
  misc_feature: DNAzyme
gacagtagggctagctacaacgattagcgcg

SEQ ID NO: 13556 - DNA, 31 bp, Artificial Sequence
  Description of Artificial Sequence:  Nucleic Acid
  misc_feature: DNAzyme
tgggacagggctagctacaacgaagcttagc

SEQ ID NO: 13557 - DNA, 31 bp, Artificial Sequence
  Description of Artificial Sequence:  Nucleic Acid
  misc_feature: DNAzyme
ccctgggaggctagctacaacgaagtagctt

SEQ ID NO: 13558 - DNA, 31 bp, Artificial Sequence
  Description of Artificial Sequence:  Nucleic Acid
  misc_feature: DNAzyme
ggtggcggggctagctacaacgacctccccc

SEQ ID NO: 13559 - DNA, 31 bp, Artificial Sequence
  Description of Artificial Sequence:  Nucleic Acid
  misc_feature: DNAzyme
acaggtggggctagctacaacgaggccctcc

SEQ ID NO: 13560 - DNA, 31 bp, Artificial Sequence
  Description of Artificial Sequence:  Nucleic Acid
  misc_feature: DNAzyme
gccacaggggctagctacaacgaggcggccc

SEQ ID NO: 13561 - DNA, 31 bp, Artificial Sequence
  Description of Artificial Sequence:  Nucleic Acid
  misc_feature: DNAzyme
acctgccaggctagctacaacgaaggtggcg

SEQ ID NO: 13562 - DNA, 31 bp, Artificial Sequence
  Description of Artificial Sequence:  Nucleic Acid
  misc_feature: DNAzyme
ggtacctgggctagctacaacgacacaggtg

SEQ ID NO: 13563 - DNA, 31 bp, Artificial Sequence
  Description of Artificial Sequence:  Nucleic Acid
  misc_feature: DNAzyme
aagaggtaggctagctacaacgactgccaca

SEQ ID NO: 13564 - DNA, 31 bp, Artificial Sequence
  Description of Artificial Sequence:  Nucleic Acid
  misc_feature: DNAzyme
tgaagaggggctagctacaacgaacctgcca

SEQ ID NO: 13565 - DNA, 31 bp, Artificial Sequence
  Description of Artificial Sequence:  Nucleic Acid
  misc_feature: DNAzyme
ctgcccagggctagctacaacgatgaagagg

SEQ ID NO: 13566 - DNA, 31 bp, Artificial Sequence
  Description of Artificial Sequence:  Nucleic Acid
  misc_feature: DNAzyme
ctttactgggctagctacaacgaccagttga

SEQ ID NO: 13567 - DNA, 31 bp, Artificial Sequence
  Description of Artificial Sequence:  Nucleic Acid
  misc_feature: DNAzyme
ggtctttaggctagctacaacgatgcccagt

SEQ ID NO: 13568 - DNA, 31 bp, Artificial Sequence
  Description of Artificial Sequence:  Nucleic Acid
  misc_feature: DNAzyme
gagtttggggctagctacaacgactttactg

SEQ ID NO: 13569 - DNA, 31 bp, Artificial Sequence
  Description of Artificial Sequence:  Nucleic Acid
  misc_feature: DNAzyme
agtttgagggctagctacaacgattggtctt

SEQ ID NO: 13570 - DNA, 31 bp, Artificial Sequence
  Description of Artificial Sequence:  Nucleic Acid
  misc_feature: DNAzyme
ggagtgagggctagctacaacgattgagttt

SEQ ID NO: 13571 - DNA, 31 bp, Artificial Sequence
  Description of Artificial Sequence:  Nucleic Acid
  misc_feature: DNAzyme
gattggagggctagctacaacgagagtttga

SEQ ID NO: 13572 - DNA, 31 bp, Artificial Sequence
  Description of Artificial Sequence:  Nucleic Acid
  misc_feature: DNAzyme
agctgggaggctagctacaacgatggagtga

SEQ ID NO: 13573 - DNA, 31 bp, Artificial Sequence
  Description of Artificial Sequence:  Nucleic Acid
  misc_feature: DNAzyme
agacgcagggctagctacaacgatgggattg

SEQ ID NO: 13574 - DNA, 31 bp, Artificial Sequence
  Description of Artificial Sequence:  Nucleic Acid
  misc_feature: DNAzyme
ctgagacgggctagctacaacgaagctggga

SEQ ID NO: 13575 - DNA, 31 bp, Artificial Sequence
  Description of Artificial Sequence:  Nucleic Acid
  misc_feature: DNAzyme
aactgagaggctagctacaacgagcagctgg

SEQ ID NO: 13576 - DNA, 31 bp, Artificial Sequence
  Description of Artificial Sequence:  Nucleic Acid
  misc_feature: DNAzyme
aagtccaaggctagctacaacgatgagacgc

SEQ ID NO: 13577 - DNA, 31 bp, Artificial Sequence
  Description of Artificial Sequence:  Nucleic Acid
  misc_feature: DNAzyme
tggacaagggctagctacaacgaccaactga

SEQ ID NO: 13578 - DNA, 31 bp, Artificial Sequence
  Description of Artificial Sequence:  Nucleic Acid
  misc_feature: DNAzyme
cagttggaggctagctacaacgaaagtccaa

SEQ ID NO: 13579 - DNA, 31 bp, Artificial Sequence
  Description of Artificial Sequence:  Nucleic Acid
  misc_feature: DNAzyme
cgaaccagggctagctacaacgatggacaag

SEQ ID NO: 13580 - DNA, 31 bp, Artificial Sequence
  Description of Artificial Sequence:  Nucleic Acid
  misc_feature: DNAzyme
gcaacgaaggctagctacaacgacagttgga

SEQ ID NO: 13581 - DNA, 31 bp, Artificial Sequence
  Description of Artificial Sequence:  Nucleic Acid
  misc_feature: DNAzyme
gccagcaaggctagctacaacgagaaccagt

SEQ ID NO: 13582 - DNA, 31 bp, Artificial Sequence
  Description of Artificial Sequence:  Nucleic Acid
  misc_feature: DNAzyme
gtagccagggctagctacaacgaaacgaacc

SEQ ID NO: 13583 - DNA, 31 bp, Artificial Sequence
  Description of Artificial Sequence:  Nucleic Acid
  misc_feature: DNAzyme
cgctgtagggctagctacaacgacagcaacg

SEQ ID NO: 13584 - DNA, 31 bp, Artificial Sequence
  Description of Artificial Sequence:  Nucleic Acid
  misc_feature: DNAzyme
ccccgctgggctagctacaacgaagccagca

SEQ ID NO: 13585 - DNA, 31 bp, Artificial Sequence
  Description of Artificial Sequence:  Nucleic Acid
  misc_feature: DNAzyme
ctcccccgggctagctacaacgatgtagcca

SEQ ID NO: 13586 - DNA, 31 bp, Artificial Sequence
  Description of Artificial Sequence:  Nucleic Acid
  misc_feature: DNAzyme
gatacacgggctagctacaacgactcccccg

SEQ ID NO: 13587 - DNA, 31 bp, Artificial Sequence
  Description of Artificial Sequence:  Nucleic Acid
  misc_feature: DNAzyme
gtgatacaggctagctacaacgagtctcccc

SEQ ID NO: 13588 - DNA, 31 bp, Artificial Sequence
  Description of Artificial Sequence:  Nucleic Acid
  misc_feature: DNAzyme
ctgtgataggctagctacaacgaacgtctcc

SEQ ID NO: 13589 - DNA, 31 bp, Artificial Sequence
  Description of Artificial Sequence:  Nucleic Acid
  misc_feature: DNAzyme
ggctgtgaggctagctacaacgaacacgtct

SEQ ID NO: 13590 - DNA, 31 bp, Artificial Sequence
  Description of Artificial Sequence:  Nucleic Acid
  misc_feature: DNAzyme
acaggctgggctagctacaacgagatacacg

SEQ ID NO: 13591 - DNA, 31 bp, Artificial Sequence
  Description of Artificial Sequence:  Nucleic Acid
  misc_feature: DNAzyme
gagacaggggctagctacaacgatgtgatac

SEQ ID NO: 13592 - DNA, 31 bp, Artificial Sequence
  Description of Artificial Sequence:  Nucleic Acid
  misc_feature: DNAzyme
gcacgagaggctagctacaacgaaggctgtg

SEQ ID NO: 13593 - DNA, 31 bp, Artificial Sequence
  Description of Artificial Sequence:  Nucleic Acid
  misc_feature: DNAzyme
gtcgggcaggctagctacaacgagagacagg

SEQ ID NO: 13594 - DNA, 31 bp, Artificial Sequence
  Description of Artificial Sequence:  Nucleic Acid
  misc_feature: DNAzyme
gggtcgggggctagctacaacgaacgagaca

SEQ ID NO: 13595 - DNA, 31 bp, Artificial Sequence
  Description of Artificial Sequence:  Nucleic Acid
  misc_feature: DNAzyme
cagcggggggctagctacaacgacgggcacg

SEQ ID NO: 13596 - DNA, 31 bp, Artificial Sequence
  Description of Artificial Sequence:  Nucleic Acid
  misc_feature: DNAzyme
tgaaccagggctagctacaacgaggggtcgg

SEQ ID NO: 13597 - DNA, 31 bp, Artificial Sequence
  Description of Artificial Sequence:  Nucleic Acid
  misc_feature: DNAzyme
agcatgaaggctagctacaacgacagcgggg

SEQ ID NO: 13598 - DNA, 31 bp, Artificial Sequence
  Description of Artificial Sequence:  Nucleic Acid
  misc_feature: DNAzyme
gcaaagcaggctagctacaacgagaaccagc

SEQ ID NO: 13599 - DNA, 31 bp, Artificial Sequence
  Description of Artificial Sequence:  Nucleic Acid
  misc_feature: DNAzyme
aggcaaagggctagctacaacgaatgaacca

SEQ ID NO: 13600 - DNA, 31 bp, Artificial Sequence
  Description of Artificial Sequence:  Nucleic Acid
  misc_feature: DNAzyme
ggagtaggggctagctacaacgaaaagcatg

SEQ ID NO: 13601 - DNA, 31 bp, Artificial Sequence
  Description of Artificial Sequence:  Nucleic Acid
  misc_feature: DNAzyme
agtaggagggctagctacaacgaaggcaaag

SEQ ID NO: 13602 - DNA, 31 bp, Artificial Sequence
  Description of Artificial Sequence:  Nucleic Acid
  misc_feature: DNAzyme
acggagagggctagctacaacgaaggagtag

SEQ ID NO: 13603 - DNA, 31 bp, Artificial Sequence
  Description of Artificial Sequence:  Nucleic Acid
  misc_feature: DNAzyme
tacccctaggctagctacaacgaggagagta

SEQ ID NO: 13604 - DNA, 31 bp, Artificial Sequence
  Description of Artificial Sequence:  Nucleic Acid
  misc_feature: DNAzyme
gatgcctaggctagctacaacgaccctacgg

SEQ ID NO: 13605 - DNA, 31 bp, Artificial Sequence
  Description of Artificial Sequence:  Nucleic Acid
  misc_feature: DNAzyme
ggtagatgggctagctacaacgactacccct

SEQ ID NO: 13606 - DNA, 31 bp, Artificial Sequence
  Description of Artificial Sequence:  Nucleic Acid
  misc_feature: DNAzyme
caggtagaggctagctacaacgagcctaccc

SEQ ID NO: 13607 - DNA, 31 bp, Artificial Sequence
  Description of Artificial Sequence:  Nucleic Acid
  misc_feature: DNAzyme
ggagcaggggctagctacaacgaagatgcct

SEQ ID NO: 13608 - DNA, 31 bp, Artificial Sequence
  Description of Artificial Sequence:  Nucleic Acid
  misc_feature: DNAzyme
ttggggagggctagctacaacgaaggtagat

SEQ ID NO: 13609 - DNA, 31 bp, Artificial Sequence
  Description of Artificial Sequence:  Nucleic Acid
  misc_feature: DNAzyme
ttcatcggggctagctacaacgatggggagc

SEQ ID NO: 13610 - DNA, 31 bp, Artificial Sequence
  Description of Artificial Sequence:  Nucleic Acid
  misc_feature: DNAzyme
cctgttcaggctagctacaacgacggttggg

SEQ ID NO: 13611 - DNA, 31 bp, Artificial Sequence
  Description of Artificial Sequence:  Nucleic Acid
  misc_feature: DNAzyme
gctccctgggctagctacaacgatcatcggt

SEQ ID NO: 13612 - DNA, 31 bp, Artificial Sequence
  Description of Artificial Sequence:  Nucleic Acid
  misc_feature: DNAzyme
gtgtttagggctagctacaacgatccctgtt

SEQ ID NO: 13613 - DNA, 31 bp, Artificial Sequence
  Description of Artificial Sequence:  Nucleic Acid
  misc_feature: DNAzyme
ctggagtgggctagctacaacgattagctcc

SEQ ID NO: 13614 - DNA, 31 bp, Artificial Sequence
  Description of Artificial Sequence:  Nucleic Acid
  misc_feature: DNAzyme
gcctggagggctagctacaacgagtttagct

SEQ ID NO: 13615 - DNA, 31 bp, Artificial Sequence
  Description of Artificial Sequence:  Nucleic Acid
  misc_feature: DNAzyme
cctattggggctagctacaacgactggagtg

SEQ ID NO: 13616 - DNA, 31 bp, Artificial Sequence
  Description of Artificial Sequence:  Nucleic Acid
  misc_feature: DNAzyme
atggcctaggctagctacaacgatggcctgg

SEQ ID NO: 13617 - DNA, 31 bp, Artificial Sequence
  Description of Artificial Sequence:  Nucleic Acid
  misc_feature: DNAzyme
cgggatggggctagctacaacgactattggc

SEQ ID NO: 13618 - DNA, 31 bp, Artificial Sequence
  Description of Artificial Sequence:  Nucleic Acid
  misc_feature: DNAzyme
aaacgggaggctagctacaacgaggcctatt

SEQ ID NO: 13619 - DNA, 31 bp, Artificial Sequence
  Description of Artificial Sequence:  Nucleic Acid
  misc_feature: DNAzyme
aaaaaaaaggctagctacaacgagggatggc

SEQ ID NO: 13620 - DNA, 31 bp, Artificial Sequence
  Description of Artificial Sequence:  Nucleic Acid
  misc_feature: DNAzyme
ccatcccgggctagctacaacgatttttttt

SEQ ID NO: 13621 - DNA, 31 bp, Artificial Sequence
  Description of Artificial Sequence:  Nucleic Acid
  misc_feature: DNAzyme
ataggccaggctagctacaacgacccgtttt

SEQ ID NO: 13622 - DNA, 31 bp, Artificial Sequence
  Description of Artificial Sequence:  Nucleic Acid
  misc_feature: DNAzyme
ccaataggggctagctacaacgacatcccgt

SEQ ID NO: 13623 - DNA, 31 bp, Artificial Sequence
  Description of Artificial Sequence:  Nucleic Acid
  misc_feature: DNAzyme
caggccaaggctagctacaacgaaggccatc

SEQ ID NO: 13624 - DNA, 31 bp, Artificial Sequence
  Description of Artificial Sequence:  Nucleic Acid
  misc_feature: DNAzyme
actccaggggctagctacaacgacaataggc

SEQ ID NO: 13625 - DNA, 31 bp, Artificial Sequence
  Description of Artificial Sequence:  Nucleic Acid
  misc_feature: DNAzyme
gctaaacaggctagctacaacgatccaggcc

SEQ ID NO: 13626 - DNA, 31 bp, Artificial Sequence
  Description of Artificial Sequence:  Nucleic Acid
  misc_feature: DNAzyme
gagctaaaggctagctacaacgaactccagg

SEQ ID NO: 13627 - DNA, 31 bp, Artificial Sequence
  Description of Artificial Sequence:  Nucleic Acid
  misc_feature: DNAzyme
acagggagggctagctacaacgataaacact

SEQ ID NO: 13628 - DNA, 31 bp, Artificial Sequence
  Description of Artificial Sequence:  Nucleic Acid
  misc_feature: DNAzyme
ccgatgaaggctagctacaacgaagggagct

SEQ ID NO: 13629 - DNA, 31 bp, Artificial Sequence
  Description of Artificial Sequence:  Nucleic Acid
  misc_feature: DNAzyme
ccaaccgaggctagctacaacgagaacaggg

SEQ ID NO: 13630 - DNA, 31 bp, Artificial Sequence
  Description of Artificial Sequence:  Nucleic Acid
  misc_feature: DNAzyme
ctccccaaggctagctacaacgacgatgaac

SEQ ID NO: 13631 - DNA, 31 bp, Artificial Sequence
  Description of Artificial Sequence:  Nucleic Acid
  misc_feature: DNAzyme
tctacctgggctagctacaacgatccccaac

SEQ ID NO: 13632 - DNA, 31 bp, Artificial Sequence
  Description of Artificial Sequence:  Nucleic Acid
  misc_feature: DNAzyme
ggcatctaggctagctacaacgactgctccc

SEQ ID NO: 13633 - DNA, 31 bp, Artificial Sequence
  Description of Artificial Sequence:  Nucleic Acid
  misc_feature: DNAzyme
ggtaggcaggctagctacaacgactacctgc

SEQ ID NO: 13634 - DNA, 31 bp, Artificial Sequence
  Description of Artificial Sequence:  Nucleic Acid
  misc_feature: DNAzyme
ggggtaggggctagctacaacgaatctacct

SEQ ID NO: 13635 - DNA, 31 bp, Artificial Sequence
  Description of Artificial Sequence:  Nucleic Acid
  misc_feature: DNAzyme
cgtaggggggctagctacaacgaaggcatct

SEQ ID NO: 13636 - DNA, 31 bp, Artificial Sequence
  Description of Artificial Sequence:  Nucleic Acid
  misc_feature: DNAzyme
actctccgggctagctacaacgaaggggtag

SEQ ID NO: 13637 - DNA, 31 bp, Artificial Sequence
  Description of Artificial Sequence:  Nucleic Acid
  misc_feature: DNAzyme
tactcctaggctagctacaacgatctccgta

SEQ ID NO: 13638 - DNA, 31 bp, Artificial Sequence
  Description of Artificial Sequence:  Nucleic Acid
  misc_feature: DNAzyme
tttgcctaggctagctacaacgatcctactc

SEQ ID NO: 13639 - DNA, 31 bp, Artificial Sequence
  Description of Artificial Sequence:  Nucleic Acid
  misc_feature: DNAzyme
atgctttgggctagctacaacgactactcct

SEQ ID NO: 13640 - DNA, 31 bp, Artificial Sequence
  Description of Artificial Sequence:  Nucleic Acid
  misc_feature: DNAzyme
ggttcatgggctagctacaacgatttgccta

SEQ ID NO: 13641 - DNA, 31 bp, Artificial Sequence
  Description of Artificial Sequence:  Nucleic Acid
  misc_feature: DNAzyme
ctggttcaggctagctacaacgagctttgcc

SEQ ID NO: 13642 - DNA, 31 bp, Artificial Sequence
  Description of Artificial Sequence:  Nucleic Acid
  misc_feature: DNAzyme
cccgctggggctagctacaacgatcatgctt

SEQ ID NO: 13643 - DNA, 31 bp, Artificial Sequence
  Description of Artificial Sequence:  Nucleic Acid
  misc_feature: DNAzyme
cgaccccgggctagctacaacgatggttcat

SEQ ID NO: 13644 - DNA, 31 bp, Artificial Sequence
  Description of Artificial Sequence:  Nucleic Acid
  misc_feature: DNAzyme
gtgcccgaggctagctacaacgacccgctgg

SEQ ID NO: 13645 - DNA, 31 bp, Artificial Sequence
  Description of Artificial Sequence:  Nucleic Acid
  misc_feature: DNAzyme
gtctcgtgggctagctacaacgaccgacccc

SEQ ID NO: 13646 - DNA, 31 bp, Artificial Sequence
  Description of Artificial Sequence:  Nucleic Acid
  misc_feature: DNAzyme
ctgtctcgggctagctacaacgagcccgacc

SEQ ID NO: 13647 - DNA, 31 bp, Artificial Sequence
  Description of Artificial Sequence:  Nucleic Acid
  misc_feature: DNAzyme
acagcctgggctagctacaacgactcgtgcc

SEQ ID NO: 13648 - DNA, 31 bp, Artificial Sequence
  Description of Artificial Sequence:  Nucleic Acid
  misc_feature: DNAzyme
tatcacagggctagctacaacgactgtctcg

SEQ ID NO: 13649 - DNA, 31 bp, Artificial Sequence
  Description of Artificial Sequence:  Nucleic Acid
  misc_feature: DNAzyme
gtgtatcaggctagctacaacgaagcctgtc

SEQ ID NO: 13650 - DNA, 31 bp, Artificial Sequence
  Description of Artificial Sequence:  Nucleic Acid
  misc_feature: DNAzyme
gacgtgtaggctagctacaacgacacagcct

SEQ ID NO: 13651 - DNA, 31 bp, Artificial Sequence
  Description of Artificial Sequence:  Nucleic Acid
  misc_feature: DNAzyme
gagacgtgggctagctacaacgaatcacagc

SEQ ID NO: 13652 - DNA, 31 bp, Artificial Sequence
  Description of Artificial Sequence:  Nucleic Acid
  misc_feature: DNAzyme
gggagacgggctagctacaacgagtatcaca

SEQ ID NO: 13653 - DNA, 31 bp, Artificial Sequence
  Description of Artificial Sequence:  Nucleic Acid
  misc_feature: DNAzyme
gggggagaggctagctacaacgagtgtatca

SEQ ID NO: 13654 - DNA, 31 bp, Artificial Sequence
  Description of Artificial Sequence:  Nucleic Acid
  misc_feature: DNAzyme
ggctacagggctagctacaacgagggggaga

SEQ ID NO: 13655 - DNA, 31 bp, Artificial Sequence
  Description of Artificial Sequence:  Nucleic Acid
  misc_feature: DNAzyme
gctggctaggctagctacaacgaagcggggg

SEQ ID NO: 13656 - DNA, 31 bp, Artificial Sequence
  Description of Artificial Sequence:  Nucleic Acid
  misc_feature: DNAzyme
gttgctggggctagctacaacgatacagcgg

SEQ ID NO: 13657 - DNA, 31 bp, Artificial Sequence
  Description of Artificial Sequence:  Nucleic Acid
  misc_feature: DNAzyme
gttcgttgggctagctacaacgatggctaca

SEQ ID NO: 13658 - DNA, 31 bp, Artificial Sequence
  Description of Artificial Sequence:  Nucleic Acid
  misc_feature: DNAzyme
ctggttcgggctagctacaacgatgctggct

SEQ ID NO: 13659 - DNA, 31 bp, Artificial Sequence
  Description of Artificial Sequence:  Nucleic Acid
  misc_feature: DNAzyme
ccaactggggctagctacaacgatcgttgct

SEQ ID NO: 13660 - DNA, 31 bp, Artificial Sequence
  Description of Artificial Sequence:  Nucleic Acid
  misc_feature: DNAzyme
ttgtccaaggctagctacaacgatggttcgt

SEQ ID NO: 13661 - DNA, 31 bp, Artificial Sequence
  Description of Artificial Sequence:  Nucleic Acid
  misc_feature: DNAzyme
tggacttgggctagctacaacgaccaactgg

SEQ ID NO: 13662 - DNA, 31 bp, Artificial Sequence
  Description of Artificial Sequence:  Nucleic Acid
  misc_feature: DNAzyme
cagttggaggctagctacaacgattgtccaa

SEQ ID NO: 13663 - DNA, 31 bp, Artificial Sequence
  Description of Artificial Sequence:  Nucleic Acid
  misc_feature: DNAzyme
cgtctcagggctagctacaacgatggacttg

SEQ ID NO: 13664 - DNA, 31 bp, Artificial Sequence
  Description of Artificial Sequence:  Nucleic Acid
  misc_feature: DNAzyme
cagctgcgggctagctacaacgactcagttg

SEQ ID NO: 13665 - DNA, 31 bp, Artificial Sequence
  Description of Artificial Sequence:  Nucleic Acid
  misc_feature: DNAzyme
cccagctgggctagctacaacgagtctcagt

SEQ ID NO: 13666 - DNA, 31 bp, Artificial Sequence
  Description of Artificial Sequence:  Nucleic Acid
  misc_feature: DNAzyme
aatcccagggctagctacaacgatgcgtctc

SEQ ID NO: 13667 - DNA, 31 bp, Artificial Sequence
  Description of Artificial Sequence:  Nucleic Acid
  misc_feature: DNAzyme
cactccaaggctagctacaacgacccagctg

SEQ ID NO: 13668 - DNA, 31 bp, Artificial Sequence
  Description of Artificial Sequence:  Nucleic Acid
  misc_feature: DNAzyme
caaactcaggctagctacaacgatccaatcc

SEQ ID NO: 13669 - DNA, 31 bp, Artificial Sequence
  Description of Artificial Sequence:  Nucleic Acid
  misc_feature: DNAzyme
aactcaaaggctagctacaacgatcactcca

SEQ ID NO: 13670 - DNA, 31 bp, Artificial Sequence
  Description of Artificial Sequence:  Nucleic Acid
  misc_feature: DNAzyme
agaccaaaggctagctacaacgatcaaactc

SEQ ID NO: 13671 - DNA, 31 bp, Artificial Sequence
  Description of Artificial Sequence:  Nucleic Acid
  misc_feature: DNAzyme
agtaaagaggctagctacaacgacaaactca

SEQ ID NO: 13672 - DNA, 31 bp, Artificial Sequence
  Description of Artificial Sequence:  Nucleic Acid
  misc_feature: DNAzyme
ctgggcagggctagctacaacgaaaagacca

SEQ ID NO: 13673 - DNA, 31 bp, Artificial Sequence
  Description of Artificial Sequence:  Nucleic Acid
  misc_feature: DNAzyme
caactgggggctagctacaacgaagtaaaga

SEQ ID NO: 13674 - DNA, 31 bp, Artificial Sequence
  Description of Artificial Sequence:  Nucleic Acid
  misc_feature: DNAzyme
ctcttcaaggctagctacaacgatgggcagt

SEQ ID NO: 13675 - DNA, 31 bp, Artificial Sequence
  Description of Artificial Sequence:  Nucleic Acid
  misc_feature: DNAzyme
ggcaggtaggctagctacaacgactcttcaa

SEQ ID NO: 13676 - DNA, 31 bp, Artificial Sequence
  Description of Artificial Sequence:  Nucleic Acid
  misc_feature: DNAzyme
gtggcaggggctagctacaacgaacctcttc

SEQ ID NO: 13677 - DNA, 31 bp, Artificial Sequence
  Description of Artificial Sequence:  Nucleic Acid
  misc_feature: DNAzyme
acctgtggggctagctacaacgaaggtacct

SEQ ID NO: 13678 - DNA, 31 bp, Artificial Sequence
  Description of Artificial Sequence:  Nucleic Acid
  misc_feature: DNAzyme
gccacctgggctagctacaacgaggcaggta

SEQ ID NO: 13679 - DNA, 31 bp, Artificial Sequence
  Description of Artificial Sequence:  Nucleic Acid
  misc_feature: DNAzyme
ggccgccaggctagctacaacgactgtggca

SEQ ID NO: 13680 - DNA, 31 bp, Artificial Sequence
  Description of Artificial Sequence:  Nucleic Acid
  misc_feature: DNAzyme
gagggccgggctagctacaacgacacctgtg

SEQ ID NO: 13681 - DNA, 31 bp, Artificial Sequence
  Description of Artificial Sequence:  Nucleic Acid
  misc_feature: DNAzyme
ggggagggggctagctacaacgacgccacct

SEQ ID NO: 13682 - DNA, 31 bp, Artificial Sequence
  Description of Artificial Sequence:  Nucleic Acid
  misc_feature: DNAzyme
agctactgggctagctacaacgacccagggg

SEQ ID NO: 13683 - DNA, 31 bp, Artificial Sequence
  Description of Artificial Sequence:  Nucleic Acid
  misc_feature: DNAzyme
ctaagctaggctagctacaacgatgtcccag

SEQ ID NO: 13684 - DNA, 31 bp, Artificial Sequence
  Description of Artificial Sequence:  Nucleic Acid
  misc_feature: DNAzyme
gcgctaagggctagctacaacgatactgtcc

SEQ ID NO: 13685 - DNA, 31 bp, Artificial Sequence
  Description of Artificial Sequence:  Nucleic Acid
  misc_feature: DNAzyme
tgttcgcgggctagctacaacgataagctac

SEQ ID NO: 13686 - DNA, 31 bp, Artificial Sequence
  Description of Artificial Sequence:  Nucleic Acid
  misc_feature: DNAzyme
agtgttcgggctagctacaacgagctaagct

SEQ ID NO: 13687 - DNA, 31 bp, Artificial Sequence
  Description of Artificial Sequence:  Nucleic Acid
  misc_feature: DNAzyme
cagaagtgggctagctacaacgatcgcgcta

SEQ ID NO: 13688 - DNA, 31 bp, Artificial Sequence
  Description of Artificial Sequence:  Nucleic Acid
  misc_feature: DNAzyme
gccagaagggctagctacaacgagttcgcgc

SEQ ID NO: 13689 - DNA, 31 bp, Artificial Sequence
  Description of Artificial Sequence:  Nucleic Acid
  misc_feature: DNAzyme
acatcgggggctagctacaacgacagaagtg

SEQ ID NO: 13690 - DNA, 31 bp, Artificial Sequence
  Description of Artificial Sequence:  Nucleic Acid
  misc_feature: DNAzyme
tggagacaggctagctacaacgacgggccag

SEQ ID NO: 13691 - DNA, 31 bp, Artificial Sequence
  Description of Artificial Sequence:  Nucleic Acid
  misc_feature: DNAzyme
cctggagaggctagctacaacgaatcgggcc

SEQ ID NO: 13692 - DNA, 31 bp, Artificial Sequence
  Description of Artificial Sequence:  Nucleic Acid
  misc_feature: DNAzyme
cttgcgaaggctagctacaacgactggagac

SEQ ID NO: 13693 - DNA, 31 bp, Artificial Sequence
  Description of Artificial Sequence:  Nucleic Acid
  misc_feature: DNAzyme
cacccttgggctagctacaacgagaacctgg

SEQ ID NO: 13694 - DNA, 31 bp, Artificial Sequence
  Description of Artificial Sequence:  Nucleic Acid
  misc_feature: DNAzyme
gggtaccaggctagctacaacgaccttgcga

SEQ ID NO: 13695 - DNA, 31 bp, Artificial Sequence
  Description of Artificial Sequence:  Nucleic Acid
  misc_feature: DNAzyme
ttggggtaggctagctacaacgacacccttg

SEQ ID NO: 13696 - DNA, 31 bp, Artificial Sequence
  Description of Artificial Sequence:  Nucleic Acid
  misc_feature: DNAzyme
acttggggggctagctacaacgaaccaccct

SEQ ID NO: 13697 - DNA, 31 bp, Artificial Sequence
  Description of Artificial Sequence:  Nucleic Acid
  misc_feature: DNAzyme
tcaggaaaggctagctacaacgattggggta

SEQ ID NO: 13698 - DNA, 31 bp, Artificial Sequence
  Description of Artificial Sequence:  Nucleic Acid
  misc_feature: DNAzyme
gcatcatgggctagctacaacgactcaggaa

SEQ ID NO: 13699 - DNA, 31 bp, Artificial Sequence
  Description of Artificial Sequence:  Nucleic Acid
  misc_feature: DNAzyme
tggcatcaggctagctacaacgagcctcagg

SEQ ID NO: 13700 - DNA, 31 bp, Artificial Sequence
  Description of Artificial Sequence:  Nucleic Acid
  misc_feature: DNAzyme
gggtggcaggctagctacaacgacatgcctc

SEQ ID NO: 13701 - DNA, 31 bp, Artificial Sequence
  Description of Artificial Sequence:  Nucleic Acid
  misc_feature: DNAzyme
tagggtggggctagctacaacgaatcatgcc

SEQ ID NO: 13702 - DNA, 31 bp, Artificial Sequence
  Description of Artificial Sequence:  Nucleic Acid
  misc_feature: DNAzyme
caatagggggctagctacaacgaggcatcat

SEQ ID NO: 13703 - DNA, 31 bp, Artificial Sequence
  Description of Artificial Sequence:  Nucleic Acid
  misc_feature: DNAzyme
gaaatcaaggctagctacaacgaagggtggc

SEQ ID NO: 13704 - DNA, 31 bp, Artificial Sequence
  Description of Artificial Sequence:  Nucleic Acid
  misc_feature: DNAzyme
aggtgaaaggctagctacaacgacaataggg

SEQ ID NO: 13705 - DNA, 31 bp, Artificial Sequence
  Description of Artificial Sequence:  Nucleic Acid
  misc_feature: DNAzyme
tccccaggggctagctacaacgagaaatcaa

SEQ ID NO: 13706 - DNA, 31 bp, Artificial Sequence
  Description of Artificial Sequence:  Nucleic Acid
  misc_feature: DNAzyme
catagttaggctagctacaacgatccccagg

SEQ ID NO: 13707 - DNA, 31 bp, Artificial Sequence
  Description of Artificial Sequence:  Nucleic Acid
  misc_feature: DNAzyme
ctccatagggctagctacaacgatactcccc

SEQ ID NO: 13708 - DNA, 31 bp, Artificial Sequence
  Description of Artificial Sequence:  Nucleic Acid
  misc_feature: DNAzyme
tcactccaggctagctacaacgaagttactc

SEQ ID NO: 13709 - DNA, 31 bp, Artificial Sequence
  Description of Artificial Sequence:  Nucleic Acid
  misc_feature: DNAzyme
cattttcaggctagctacaacgatccatagt

SEQ ID NO: 13710 - DNA, 31 bp, Artificial Sequence
  Description of Artificial Sequence:  Nucleic Acid
  misc_feature: DNAzyme
ttagcgcaggctagctacaacgatttcactc

SEQ ID NO: 13711 - DNA, 31 bp, Artificial Sequence
  Description of Artificial Sequence:  Nucleic Acid
  misc_feature: DNAzyme
tcttagcgggctagctacaacgaattttcac

SEQ ID NO: 13712 - DNA, 31 bp, Artificial Sequence
  Description of Artificial Sequence:  Nucleic Acid
  misc_feature: DNAzyme
ggtcttagggctagctacaacgagcattttc

SEQ ID NO: 13713 - DNA, 31 bp, Artificial Sequence
  Description of Artificial Sequence:  Nucleic Acid
  misc_feature: DNAzyme
ctccatggggctagctacaacgacttagcgc

SEQ ID NO: 13714 - DNA, 31 bp, Artificial Sequence
  Description of Artificial Sequence:  Nucleic Acid
  misc_feature: DNAzyme
cgactccaggctagctacaacgaggtcttag

SEQ ID NO: 13715 - DNA, 31 bp, Artificial Sequence
  Description of Artificial Sequence:  Nucleic Acid
  misc_feature: DNAzyme
ttcagcgaggctagctacaacgatccatggt

SEQ ID NO: 13716 - DNA, 31 bp, Artificial Sequence
  Description of Artificial Sequence:  Nucleic Acid
  misc_feature: DNAzyme
tcattcagggctagctacaacgagactccat

SEQ ID NO: 13717 - DNA, 31 bp, Artificial Sequence
  Description of Artificial Sequence:  Nucleic Acid
  misc_feature: DNAzyme
tcagatcaggctagctacaacgatcagcgac

SEQ ID NO: 13718 - DNA, 31 bp, Artificial Sequence
  Description of Artificial Sequence:  Nucleic Acid
  misc_feature: DNAzyme
acctcagaggctagctacaacgacattcagc

SEQ ID NO: 13719 - DNA, 31 bp, Artificial Sequence
  Description of Artificial Sequence:  Nucleic Acid
  misc_feature: DNAzyme
ttgacctaggctagctacaacgactcagatc

SEQ ID NO: 13720 - DNA, 31 bp, Artificial Sequence
  Description of Artificial Sequence:  Nucleic Acid
  misc_feature: DNAzyme
ccacttgaggctagctacaacgactacctca

SEQ ID NO: 13721 - DNA, 31 bp, Artificial Sequence
  Description of Artificial Sequence:  Nucleic Acid
  misc_feature: DNAzyme
ttgagccaggctagctacaacgattgaccta

SEQ ID NO: 13722 - DNA, 31 bp, Artificial Sequence
  Description of Artificial Sequence:  Nucleic Acid
  misc_feature: DNAzyme
ccattgagggctagctacaacgacacttgac

SEQ ID NO: 13723 - DNA, 31 bp, Artificial Sequence
  Description of Artificial Sequence:  Nucleic Acid
  misc_feature: DNAzyme
ttactccaggctagctacaacgatgagccac

SEQ ID NO: 13724 - DNA, 31 bp, Artificial Sequence
  Description of Artificial Sequence:  Nucleic Acid
  misc_feature: DNAzyme
gcttgttaggctagctacaacgatccattga

SEQ ID NO: 13725 - DNA, 31 bp, Artificial Sequence
  Description of Artificial Sequence:  Nucleic Acid
  misc_feature: DNAzyme
ggggcttgggctagctacaacgatactccat

SEQ ID NO: 13726 - DNA, 31 bp, Artificial Sequence
  Description of Artificial Sequence:  Nucleic Acid
  misc_feature: DNAzyme
ctacggggggctagctacaacgattgttact

SEQ ID NO: 13727 - DNA, 31 bp, Artificial Sequence
  Description of Artificial Sequence:  Nucleic Acid
  misc_feature: DNAzyme
cagatctaggctagctacaacgaggggcttg

SEQ ID NO: 13728 - DNA, 31 bp, Artificial Sequence
  Description of Artificial Sequence:  Nucleic Acid
  misc_feature: DNAzyme
ctgccagaggctagctacaacgactacgggg

SEQ ID NO: 13729 - DNA, 31 bp, Artificial Sequence
  Description of Artificial Sequence:  Nucleic Acid
  misc_feature: DNAzyme
ctagactgggctagctacaacgacagatcta

SEQ ID NO: 13730 - DNA, 31 bp, Artificial Sequence
  Description of Artificial Sequence:  Nucleic Acid
  misc_feature: DNAzyme
gccctagaggctagctacaacgatgccagat

SEQ ID NO: 13731 - DNA, 31 bp, Artificial Sequence
  Description of Artificial Sequence:  Nucleic Acid
  misc_feature: DNAzyme
tgagaaagggctagctacaacgacctagact

SEQ ID NO: 13732 - DNA, 31 bp, Artificial Sequence
  Description of Artificial Sequence:  Nucleic Acid
  misc_feature: DNAzyme
aggagcaaggctagctacaacgattgagaaa

SEQ ID NO: 13733 - DNA, 31 bp, Artificial Sequence
  Description of Artificial Sequence:  Nucleic Acid
  misc_feature: DNAzyme
cccaggagggctagctacaacgaaacttgag

SEQ ID NO: 13734 - DNA, 31 bp, Artificial Sequence
  Description of Artificial Sequence:  Nucleic Acid
  misc_feature: DNAzyme
ccttctagggctagctacaacgaccaggagc

SEQ ID NO: 13735 - DNA, 31 bp, Artificial Sequence
  Description of Artificial Sequence:  Nucleic Acid
  misc_feature: DNAzyme
cttctccaggctagctacaacgaccttctag

SEQ ID NO: 13736 - DNA, 31 bp, Artificial Sequence
  Description of Artificial Sequence:  Nucleic Acid
  misc_feature: DNAzyme
atgactcaggctagctacaacgattcttctc

SEQ ID NO: 13737 - DNA, 31 bp, Artificial Sequence
  Description of Artificial Sequence:  Nucleic Acid
  misc_feature: DNAzyme
tctgatgaggctagctacaacgatcacttct

SEQ ID NO: 13738 - DNA, 31 bp, Artificial Sequence
  Description of Artificial Sequence:  Nucleic Acid
  misc_feature: DNAzyme
gattctgaggctagctacaacgagactcact

SEQ ID NO: 13739 - DNA, 31 bp, Artificial Sequence
  Description of Artificial Sequence:  Nucleic Acid
  misc_feature: DNAzyme
aaggatgaggctagctacaacgatctgatga

SEQ ID NO: 13740 - DNA, 31 bp, Artificial Sequence
  Description of Artificial Sequence:  Nucleic Acid
  misc_feature: DNAzyme
ggtaaggaggctagctacaacgagattctga

SEQ ID NO: 13741 - DNA, 31 bp, Artificial Sequence
  Description of Artificial Sequence:  Nucleic Acid
  misc_feature: DNAzyme
tctatgggggctagctacaacgaaaggatga

SEQ ID NO: 13742 - DNA, 31 bp, Artificial Sequence
  Description of Artificial Sequence:  Nucleic Acid
  misc_feature: DNAzyme
ccactctaggctagctacaacgagggtaagg

SEQ ID NO: 13743 - DNA, 31 bp, Artificial Sequence
  Description of Artificial Sequence:  Nucleic Acid
  misc_feature: DNAzyme
tgcacccaggctagctacaacgatctatggg

SEQ ID NO: 13744 - DNA, 31 bp, Artificial Sequence
  Description of Artificial Sequence:  Nucleic Acid
  misc_feature: DNAzyme
tgtttgcaggctagctacaacgaccactcta

SEQ ID NO: 13745 - DNA, 31 bp, Artificial Sequence
  Description of Artificial Sequence:  Nucleic Acid
  misc_feature: DNAzyme
catgtttgggctagctacaacgaacccactc

SEQ ID NO: 13746 - DNA, 31 bp, Artificial Sequence
  Description of Artificial Sequence:  Nucleic Acid
  misc_feature: DNAzyme
tcatcatgggctagctacaacgattgcaccc

SEQ ID NO: 13747 - DNA, 31 bp, Artificial Sequence
  Description of Artificial Sequence:  Nucleic Acid
  misc_feature: DNAzyme
catcatcaggctagctacaacgagtttgcac

SEQ ID NO: 13748 - DNA, 31 bp, Artificial Sequence
  Description of Artificial Sequence:  Nucleic Acid
  misc_feature: DNAzyme
caacatcaggctagctacaacgacatgtttg

SEQ ID NO: 13749 - DNA, 31 bp, Artificial Sequence
  Description of Artificial Sequence:  Nucleic Acid
  misc_feature: DNAzyme
aggcaacaggctagctacaacgacatcatgt

SEQ ID NO: 13750 - DNA, 31 bp, Artificial Sequence
  Description of Artificial Sequence:  Nucleic Acid
  misc_feature: DNAzyme
ctaggcaaggctagctacaacgaatcatcat

SEQ ID NO: 13751 - DNA, 31 bp, Artificial Sequence
  Description of Artificial Sequence:  Nucleic Acid
  misc_feature: DNAzyme
tggctaggggctagctacaacgaaacatcat

SEQ ID NO: 13752 - DNA, 31 bp, Artificial Sequence
  Description of Artificial Sequence:  Nucleic Acid
  misc_feature: DNAzyme
actcctggggctagctacaacgataggcaac

SEQ ID NO: 13753 - DNA, 31 bp, Artificial Sequence
  Description of Artificial Sequence:  Nucleic Acid
  misc_feature: DNAzyme
ccagtcaaggctagctacaacgatcctggct

SEQ ID NO: 13754 - DNA, 31 bp, Artificial Sequence
  Description of Artificial Sequence:  Nucleic Acid
  misc_feature: DNAzyme
cactccagggctagctacaacgacaactcct

SEQ ID NO: 13755 - DNA, 31 bp, Artificial Sequence
  Description of Artificial Sequence:  Nucleic Acid
  misc_feature: DNAzyme
tagaagcaggctagctacaacgatccagtca

SEQ ID NO: 13756 - DNA, 31 bp, Artificial Sequence
  Description of Artificial Sequence:  Nucleic Acid
  misc_feature: DNAzyme
gctagaagggctagctacaacgaactccagt

SEQ ID NO: 13757 - DNA, 31 bp, Artificial Sequence
  Description of Artificial Sequence:  Nucleic Acid
  misc_feature: DNAzyme
ggagacagggctagctacaacgatagaagca

SEQ ID NO: 13758 - DNA, 31 bp, Artificial Sequence
  Description of Artificial Sequence:  Nucleic Acid
  misc_feature: DNAzyme
gtgggagaggctagctacaacgaagctagaa

SEQ ID NO: 13759 - DNA, 31 bp, Artificial Sequence
  Description of Artificial Sequence:  Nucleic Acid
  misc_feature: DNAzyme
gggctgcgggctagctacaacgagggagaca

SEQ ID NO: 13760 - DNA, 31 bp, Artificial Sequence
  Description of Artificial Sequence:  Nucleic Acid
  misc_feature: DNAzyme
gcgggctgggctagctacaacgagtgggaga

SEQ ID NO: 13761 - DNA, 31 bp, Artificial Sequence
  Description of Artificial Sequence:  Nucleic Acid
  misc_feature: DNAzyme
tgcgcgggggctagctacaacgatgcgtggg

SEQ ID NO: 13762 - DNA, 31 bp, Artificial Sequence
  Description of Artificial Sequence:  Nucleic Acid
  misc_feature: DNAzyme
cccttgcgggctagctacaacgagggctgcg

SEQ ID NO: 13763 - DNA, 31 bp, Artificial Sequence
  Description of Artificial Sequence:  Nucleic Acid
  misc_feature: DNAzyme
cccccttgggctagctacaacgagcgggctg

SEQ ID NO: 13764 - DNA, 31 bp, Artificial Sequence
  Description of Artificial Sequence:  Nucleic Acid
  misc_feature: DNAzyme
ccccaccaggctagctacaacgacccccttg

SEQ ID NO: 13765 - DNA, 31 bp, Artificial Sequence
  Description of Artificial Sequence:  Nucleic Acid
  misc_feature: DNAzyme
tgaccccaggctagctacaacgacacccccc

SEQ ID NO: 13766 - DNA, 31 bp, Artificial Sequence
  Description of Artificial Sequence:  Nucleic Acid
  misc_feature: DNAzyme
acccgtgaggctagctacaacgacccaccac

SEQ ID NO: 13767 - DNA, 31 bp, Artificial Sequence
  Description of Artificial Sequence:  Nucleic Acid
  misc_feature: DNAzyme
ctcacccgggctagctacaacgagaccccac

SEQ ID NO: 13768 - DNA, 31 bp, Artificial Sequence
  Description of Artificial Sequence:  Nucleic Acid
  misc_feature: DNAzyme
ctacctcaggctagctacaacgaccgtgacc

SEQ ID NO: 13769 - DNA, 31 bp, Artificial Sequence
  Description of Artificial Sequence:  Nucleic Acid
  misc_feature: DNAzyme
gtgtactaggctagctacaacgactcacccg

SEQ ID NO: 13770 - DNA, 31 bp, Artificial Sequence
  Description of Artificial Sequence:  Nucleic Acid
  misc_feature: DNAzyme
agggtgtaggctagctacaacgatacctcac

SEQ ID NO: 13771 - DNA, 31 bp, Artificial Sequence
  Description of Artificial Sequence:  Nucleic Acid
  misc_feature: DNAzyme
aaagggtgggctagctacaacgaactacctc

SEQ ID NO: 13772 - DNA, 31 bp, Artificial Sequence
  Description of Artificial Sequence:  Nucleic Acid
  misc_feature: DNAzyme
caaaagggggctagctacaacgagtactacc

SEQ ID NO: 13773 - DNA, 31 bp, Artificial Sequence
  Description of Artificial Sequence:  Nucleic Acid
  misc_feature: DNAzyme
gcatctggggctagctacaacgaaaaagggt

SEQ ID NO: 13774 - DNA, 31 bp, Artificial Sequence
  Description of Artificial Sequence:  Nucleic Acid
  misc_feature: DNAzyme
acgatgcaggctagctacaacgactggcaaa

SEQ ID NO: 13775 - DNA, 31 bp, Artificial Sequence
  Description of Artificial Sequence:  Nucleic Acid
  misc_feature: DNAzyme
acacgatgggctagctacaacgaatctggca

SEQ ID NO: 13776 - DNA, 31 bp, Artificial Sequence
  Description of Artificial Sequence:  Nucleic Acid
  misc_feature: DNAzyme
gcacacgaggctagctacaacgagcatctgg

SEQ ID NO: 13777 - DNA, 31 bp, Artificial Sequence
  Description of Artificial Sequence:  Nucleic Acid
  misc_feature: DNAzyme
gttgcacaggctagctacaacgagatgcatc

SEQ ID NO: 13778 - DNA, 31 bp, Artificial Sequence
  Description of Artificial Sequence:  Nucleic Acid
  misc_feature: DNAzyme
cagttgcaggctagctacaacgaacgatgca

SEQ ID NO: 13779 - DNA, 31 bp, Artificial Sequence
  Description of Artificial Sequence:  Nucleic Acid
  misc_feature: DNAzyme
atcagttgggctagctacaacgaacacgatg

SEQ ID NO: 13780 - DNA, 31 bp, Artificial Sequence
  Description of Artificial Sequence:  Nucleic Acid
  misc_feature: DNAzyme
cgtatcagggctagctacaacgatgcacacg

SEQ ID NO: 13781 - DNA, 31 bp, Artificial Sequence
  Description of Artificial Sequence:  Nucleic Acid
  misc_feature: DNAzyme
ccaacgtaggctagctacaacgacagttgca

SEQ ID NO: 13782 - DNA, 31 bp, Artificial Sequence
  Description of Artificial Sequence:  Nucleic Acid
  misc_feature: DNAzyme
ctccaacgggctagctacaacgaatcagttg

SEQ ID NO: 13783 - DNA, 31 bp, Artificial Sequence
  Description of Artificial Sequence:  Nucleic Acid
  misc_feature: DNAzyme
tcctccaaggctagctacaacgagtatcagt

SEQ ID NO: 13784 - DNA, 31 bp, Artificial Sequence
  Description of Artificial Sequence:  Nucleic Acid
  misc_feature: DNAzyme
acatcatgggctagctacaacgatcctccaa

SEQ ID NO: 13785 - DNA, 31 bp, Artificial Sequence
  Description of Artificial Sequence:  Nucleic Acid
  misc_feature: DNAzyme
taacatcaggctagctacaacgagctcctcc

SEQ ID NO: 13786 - DNA, 31 bp, Artificial Sequence
  Description of Artificial Sequence:  Nucleic Acid
  misc_feature: DNAzyme
tgataacaggctagctacaacgacatgctcc

SEQ ID NO: 13787 - DNA, 31 bp, Artificial Sequence
  Description of Artificial Sequence:  Nucleic Acid
  misc_feature: DNAzyme
gttgataaggctagctacaacgaatcatgct

SEQ ID NO: 13788 - DNA, 31 bp, Artificial Sequence
  Description of Artificial Sequence:  Nucleic Acid
  misc_feature: DNAzyme
ggagttgaggctagctacaacgaaacatcat

SEQ ID NO: 13789 - DNA, 31 bp, Artificial Sequence
  Description of Artificial Sequence:  Nucleic Acid
  misc_feature: DNAzyme
acttggagggctagctacaacgatgataaca

SEQ ID NO: 13790 - DNA, 31 bp, Artificial Sequence
  Description of Artificial Sequence:  Nucleic Acid
  misc_feature: DNAzyme
gaatacgaggctagctacaacgattggagtt

SEQ ID NO: 13791 - DNA, 31 bp, Artificial Sequence
  Description of Artificial Sequence:  Nucleic Acid
  misc_feature: DNAzyme
ccggaataggctagctacaacgagacttgga

SEQ ID NO: 13792 - DNA, 31 bp, Artificial Sequence
  Description of Artificial Sequence:  Nucleic Acid
  misc_feature: DNAzyme
aaccggaaggctagctacaacgaacgacttg

SEQ ID NO: 13793 - DNA, 31 bp, Artificial Sequence
  Description of Artificial Sequence:  Nucleic Acid
  misc_feature: DNAzyme
cgccccaaggctagctacaacgacggaatac

SEQ ID NO: 13794 - DNA, 31 bp, Artificial Sequence
  Description of Artificial Sequence:  Nucleic Acid
  misc_feature: DNAzyme
gggacccgggctagctacaacgacccaaccg

SEQ ID NO: 13795 - DNA, 31 bp, Artificial Sequence
  Description of Artificial Sequence:  Nucleic Acid
  misc_feature: DNAzyme
cccggggaggctagctacaacgaccgcccca

SEQ ID NO: 13796 - DNA, 31 bp, Artificial Sequence
  Description of Artificial Sequence:  Nucleic Acid
  misc_feature: DNAzyme
gtactctgggctagctacaacgacccccccg

SEQ ID NO: 13797 - DNA, 31 bp, Artificial Sequence
  Description of Artificial Sequence:  Nucleic Acid
  misc_feature: DNAzyme
actaggtaggctagctacaacgatctgcccc

SEQ ID NO: 13798 - DNA, 31 bp, Artificial Sequence
  Description of Artificial Sequence:  Nucleic Acid
  misc_feature: DNAzyme
tgactaggggctagctacaacgaactctgcc

SEQ ID NO: 13799 - DNA, 31 bp, Artificial Sequence
  Description of Artificial Sequence:  Nucleic Acid
  misc_feature: DNAzyme
ggctatgaggctagctacaacgataggtact

SEQ ID NO: 13800 - DNA, 31 bp, Artificial Sequence
  Description of Artificial Sequence:  Nucleic Acid
  misc_feature: DNAzyme
ggaggctaggctagctacaacgagactaggt

SEQ ID NO: 13801 - DNA, 31 bp, Artificial Sequence
  Description of Artificial Sequence:  Nucleic Acid
  misc_feature: DNAzyme
cacggaggggctagctacaacgatatgacta

SEQ ID NO: 13802 - DNA, 31 bp, Artificial Sequence
  Description of Artificial Sequence:  Nucleic Acid
  misc_feature: DNAzyme
agtcttcaggctagctacaacgaggaggcta

SEQ ID NO: 13803 - DNA, 31 bp, Artificial Sequence
  Description of Artificial Sequence:  Nucleic Acid
  misc_feature: DNAzyme
cctacgagggctagctacaacgacttcacgg

SEQ ID NO: 13804 - DNA, 31 bp, Artificial Sequence
  Description of Artificial Sequence:  Nucleic Acid
  misc_feature: DNAzyme
cgagcctaggctagctacaacgagagtcttc

SEQ ID NO: 13805 - DNA, 31 bp, Artificial Sequence
  Description of Artificial Sequence:  Nucleic Acid
  misc_feature: DNAzyme
gcggcgagggctagctacaacgactacgagt

SEQ ID NO: 13806 - DNA, 31 bp, Artificial Sequence
  Description of Artificial Sequence:  Nucleic Acid
  misc_feature: DNAzyme
ggacgcggggctagctacaacgagagcctac

SEQ ID NO: 13807 - DNA, 31 bp, Artificial Sequence
  Description of Artificial Sequence:  Nucleic Acid
  misc_feature: DNAzyme
agaggacgggctagctacaacgaggcgagcc

SEQ ID NO: 13808 - DNA, 31 bp, Artificial Sequence
  Description of Artificial Sequence:  Nucleic Acid
  misc_feature: DNAzyme
caagaggaggctagctacaacgagcggcgag

SEQ ID NO: 13809 - DNA, 31 bp, Artificial Sequence
  Description of Artificial Sequence:  Nucleic Acid
  misc_feature: DNAzyme
tgcggggaggctagctacaacgaccaagagg

SEQ ID NO: 13810 - DNA, 31 bp, Artificial Sequence
  Description of Artificial Sequence:  Nucleic Acid
  misc_feature: DNAzyme
tgaaagtgggctagctacaacgaggggaccc

SEQ ID NO: 13811 - DNA, 31 bp, Artificial Sequence
  Description of Artificial Sequence:  Nucleic Acid
  misc_feature: DNAzyme
tgtgaaagggctagctacaacgagcggggac

SEQ ID NO: 13812 - DNA, 31 bp, Artificial Sequence
  Description of Artificial Sequence:  Nucleic Acid
  misc_feature: DNAzyme
gttatctgggctagctacaacgagaaagtgc

SEQ ID NO: 13813 - DNA, 31 bp, Artificial Sequence
  Description of Artificial Sequence:  Nucleic Acid
  misc_feature: DNAzyme
ggtcgttaggctagctacaacgactgtgaaa

SEQ ID NO: 13814 - DNA, 31 bp, Artificial Sequence
  Description of Artificial Sequence:  Nucleic Acid
  misc_feature: DNAzyme
cctggtcgggctagctacaacgatatctgtg

SEQ ID NO: 13815 - DNA, 31 bp, Artificial Sequence
  Description of Artificial Sequence:  Nucleic Acid
  misc_feature: DNAzyme
cgacctggggctagctacaacgacgttatct

SEQ ID NO: 13816 - DNA, 31 bp, Artificial Sequence
  Description of Artificial Sequence:  Nucleic Acid
  misc_feature: DNAzyme
ggagacgaggctagctacaacgactggtcgt

SEQ ID NO: 13817 - DNA, 31 bp, Artificial Sequence
  Description of Artificial Sequence:  Nucleic Acid
  misc_feature: DNAzyme
tgtggagaggctagctacaacgagacctggt

SEQ ID NO: 13818 - DNA, 31 bp, Artificial Sequence
  Description of Artificial Sequence:  Nucleic Acid
  misc_feature: DNAzyme
ctcgtgtgggctagctacaacgaggagacga

SEQ ID NO: 13819 - DNA, 31 bp, Artificial Sequence
  Description of Artificial Sequence:  Nucleic Acid
  misc_feature: DNAzyme
tgctcgtgggctagctacaacgagtggagac

SEQ ID NO: 13820 - DNA, 31 bp, Artificial Sequence
  Description of Artificial Sequence:  Nucleic Acid
  misc_feature: DNAzyme
gatgctcgggctagctacaacgagtgtggag

SEQ ID NO: 13821 - DNA, 31 bp, Artificial Sequence
  Description of Artificial Sequence:  Nucleic Acid
  misc_feature: DNAzyme
gcacgatgggctagctacaacgatcgtgtgt

SEQ ID NO: 13822 - DNA, 31 bp, Artificial Sequence
  Description of Artificial Sequence:  Nucleic Acid
  misc_feature: DNAzyme
ctgcacgaggctagctacaacgagctcgtgt

SEQ ID NO: 13823 - DNA, 31 bp, Artificial Sequence
  Description of Artificial Sequence:  Nucleic Acid
  misc_feature: DNAzyme
ggactgcaggctagctacaacgagatgctcg

SEQ ID NO: 13824 - DNA, 31 bp, Artificial Sequence
  Description of Artificial Sequence:  Nucleic Acid
  misc_feature: DNAzyme
caggactgggctagctacaacgaacgatgct

SEQ ID NO: 13825 - DNA, 31 bp, Artificial Sequence
  Description of Artificial Sequence:  Nucleic Acid
  misc_feature: DNAzyme
ctccaggaggctagctacaacgatgcacgat

SEQ ID NO: 13826 - DNA, 31 bp, Artificial Sequence
  Description of Artificial Sequence:  Nucleic Acid
  misc_feature: DNAzyme
ctgcgaagggctagctacaacgatccaggac

SEQ ID NO: 13827 - DNA, 31 bp, Artificial Sequence
  Description of Artificial Sequence:  Nucleic Acid
  misc_feature: DNAzyme
tcgagctgggctagctacaacgagaagctcc

SEQ ID NO: 13828 - DNA, 31 bp, Artificial Sequence
  Description of Artificial Sequence:  Nucleic Acid
  misc_feature: DNAzyme
ctgtcgagggctagctacaacgatgcgaagc

SEQ ID NO: 13829 - DNA, 31 bp, Artificial Sequence
  Description of Artificial Sequence:  Nucleic Acid
  misc_feature: DNAzyme
gcggcctgggctagctacaacgacgagctgc

SEQ ID NO: 13830 - DNA, 31 bp, Artificial Sequence
  Description of Artificial Sequence:  Nucleic Acid
  misc_feature: DNAzyme
ctctgcggggctagctacaacgactgtcgag

SEQ ID NO: 13831 - DNA, 31 bp, Artificial Sequence
  Description of Artificial Sequence:  Nucleic Acid
  misc_feature: DNAzyme
agcctctgggctagctacaacgaggcctgtc

SEQ ID NO: 13832 - DNA, 31 bp, Artificial Sequence
  Description of Artificial Sequence:  Nucleic Acid
  misc_feature: DNAzyme
cttgaaagggctagctacaacgactctgcgg

SEQ ID NO: 13833 - DNA, 31 bp, Artificial Sequence
  Description of Artificial Sequence:  Nucleic Acid
  misc_feature: DNAzyme
acatgttaggctagctacaacgattgaaagc

SEQ ID NO: 13834 - DNA, 31 bp, Artificial Sequence
  Description of Artificial Sequence:  Nucleic Acid
  misc_feature: DNAzyme
ctcacatgggctagctacaacgatacttgaa

SEQ ID NO: 13835 - DNA, 31 bp, Artificial Sequence
  Description of Artificial Sequence:  Nucleic Acid
  misc_feature: DNAzyme
ccctcacaggctagctacaacgagttacttg

SEQ ID NO: 13836 - DNA, 31 bp, Artificial Sequence
  Description of Artificial Sequence:  Nucleic Acid
  misc_feature: DNAzyme
taccctcaggctagctacaacgaatgttact

SEQ ID NO: 13837 - DNA, 31 bp, Artificial Sequence
  Description of Artificial Sequence:  Nucleic Acid
  misc_feature: DNAzyme
tggtaataggctagctacaacgacctcacat

SEQ ID NO: 13838 - DNA, 31 bp, Artificial Sequence
  Description of Artificial Sequence:  Nucleic Acid
  misc_feature: DNAzyme
tgtggtaaggctagctacaacgaaccctcac

SEQ ID NO: 13839 - DNA, 31 bp, Artificial Sequence
  Description of Artificial Sequence:  Nucleic Acid
  misc_feature: DNAzyme
agctgtggggctagctacaacgaaataccct

SEQ ID NO: 13840 - DNA, 31 bp, Artificial Sequence
  Description of Artificial Sequence:  Nucleic Acid
  misc_feature: DNAzyme
accagctgggctagctacaacgaggtaatac

SEQ ID NO: 13841 - DNA, 31 bp, Artificial Sequence
  Description of Artificial Sequence:  Nucleic Acid
  misc_feature: DNAzyme
acgaccagggctagctacaacgatgtggtaa

SEQ ID NO: 13842 - DNA, 31 bp, Artificial Sequence
  Description of Artificial Sequence:  Nucleic Acid
  misc_feature: DNAzyme
gctgacgaggctagctacaacgacagctgtg

SEQ ID NO: 13843 - DNA, 31 bp, Artificial Sequence
  Description of Artificial Sequence:  Nucleic Acid
  misc_feature: DNAzyme
cgtgctgaggctagctacaacgagaccagct

SEQ ID NO: 13844 - DNA, 31 bp, Artificial Sequence
  Description of Artificial Sequence:  Nucleic Acid
  misc_feature: DNAzyme
gcggcgtgggctagctacaacgatgacgacc

SEQ ID NO: 13845 - DNA, 31 bp, Artificial Sequence
  Description of Artificial Sequence:  Nucleic Acid
  misc_feature: DNAzyme
gagcggcgggctagctacaacgagctgacga

SEQ ID NO: 13846 - DNA, 31 bp, Artificial Sequence
  Description of Artificial Sequence:  Nucleic Acid
  misc_feature: DNAzyme
gcgagcggggctagctacaacgagtgctgac

SEQ ID NO: 13847 - DNA, 31 bp, Artificial Sequence
  Description of Artificial Sequence:  Nucleic Acid
  misc_feature: DNAzyme
cgcgcgagggctagctacaacgaggcgtgct

SEQ ID NO: 13848 - DNA, 31 bp, Artificial Sequence
  Description of Artificial Sequence:  Nucleic Acid
  misc_feature: DNAzyme
gtgccgcgggctagctacaacgagagcggcg

SEQ ID NO: 13849 - DNA, 31 bp, Artificial Sequence
  Description of Artificial Sequence:  Nucleic Acid
  misc_feature: DNAzyme
cggtgccgggctagctacaacgagcgagcgg

SEQ ID NO: 13850 - DNA, 31 bp, Artificial Sequence
  Description of Artificial Sequence:  Nucleic Acid
  misc_feature: DNAzyme
cgccggtgggctagctacaacgacgcgcgag

SEQ ID NO: 13851 - DNA, 31 bp, Artificial Sequence
  Description of Artificial Sequence:  Nucleic Acid
  misc_feature: DNAzyme
atcgccggggctagctacaacgagccgcgcg

SEQ ID NO: 13852 - DNA, 31 bp, Artificial Sequence
  Description of Artificial Sequence:  Nucleic Acid
  misc_feature: DNAzyme
ggttatcgggctagctacaacgacggtgccg

SEQ ID NO: 13853 - DNA, 31 bp, Artificial Sequence
  Description of Artificial Sequence:  Nucleic Acid
  misc_feature: DNAzyme
tgcggttaggctagctacaacgacgccggtg

SEQ ID NO: 13854 - DNA, 31 bp, Artificial Sequence
  Description of Artificial Sequence:  Nucleic Acid
  misc_feature: DNAzyme
aactgcggggctagctacaacgatatcgccg

SEQ ID NO: 13855 - DNA, 31 bp, Artificial Sequence
  Description of Artificial Sequence:  Nucleic Acid
  misc_feature: DNAzyme
cagaactgggctagctacaacgaggttatcg

SEQ ID NO: 13856 - DNA, 31 bp, Artificial Sequence
  Description of Artificial Sequence:  Nucleic Acid
  misc_feature: DNAzyme
gggcagaaggctagctacaacgatgcggtta

SEQ ID NO: 13857 - DNA, 31 bp, Artificial Sequence
  Description of Artificial Sequence:  Nucleic Acid
  misc_feature: DNAzyme
caaaagggggctagctacaacgaagaactgc

SEQ ID NO: 13858 - DNA, 31 bp, Artificial Sequence
  Description of Artificial Sequence:  Nucleic Acid
  misc_feature: DNAzyme
ctgactaaggctagctacaacgatcaaaagg

SEQ ID NO: 13859 - DNA, 31 bp, Artificial Sequence
  Description of Artificial Sequence:  Nucleic Acid
  misc_feature: DNAzyme
tcctctgaggctagctacaacgataattcaa

SEQ ID NO: 13860 - DNA, 31 bp, Artificial Sequence
  Description of Artificial Sequence:  Nucleic Acid
  misc_feature: DNAzyme
atcgggggggctagctacaacgacctctgac

SEQ ID NO: 13861 - DNA, 31 bp, Artificial Sequence
  Description of Artificial Sequence:  Nucleic Acid
  misc_feature: DNAzyme
gctttataggctagctacaacgacgggggtc

SEQ ID NO: 13862 - DNA, 31 bp, Artificial Sequence
  Description of Artificial Sequence:  Nucleic Acid
  misc_feature: DNAzyme
cggctttaggctagctacaacgaatcggggg

SEQ ID NO: 13863 - DNA, 31 bp, Artificial Sequence
  Description of Artificial Sequence:  Nucleic Acid
  misc_feature: DNAzyme
cagagcggggctagctacaacgatttatatc

SEQ ID NO: 13864 - DNA, 31 bp, Artificial Sequence
  Description of Artificial Sequence:  Nucleic Acid
  misc_feature: DNAzyme
tcacagagggctagctacaacgaggctttat

SEQ ID NO: 13865 - DNA, 31 bp, Artificial Sequence
  Description of Artificial Sequence:  Nucleic Acid
  misc_feature: DNAzyme
gtcgctcaggctagctacaacgaagagcggc

SEQ ID NO: 13866 - DNA, 31 bp, Artificial Sequence
  Description of Artificial Sequence:  Nucleic Acid
  misc_feature: DNAzyme
taaggtcgggctagctacaacgatcacagag

SEQ ID NO: 13867 - DNA, 31 bp, Artificial Sequence
  Description of Artificial Sequence:  Nucleic Acid
  misc_feature: DNAzyme
ccataaggggctagctacaacgacgctcaca

SEQ ID NO: 13868 - DNA, 31 bp, Artificial Sequence
  Description of Artificial Sequence:  Nucleic Acid
  misc_feature: DNAzyme
acaggccaggctagctacaacgaaaggtcgc

SEQ ID NO: 13869 - DNA, 31 bp, Artificial Sequence
  Description of Artificial Sequence:  Nucleic Acid
  misc_feature: DNAzyme
cagacaggggctagctacaacgacataaggt

SEQ ID NO: 13870 - DNA, 31 bp, Artificial Sequence
  Description of Artificial Sequence:  Nucleic Acid
  misc_feature: DNAzyme
aagccagaggctagctacaacgaaggccata

SEQ ID NO: 13871 - DNA, 31 bp, Artificial Sequence
  Description of Artificial Sequence:  Nucleic Acid
  misc_feature: DNAzyme
ccccgaagggctagctacaacgacagacagg

SEQ ID NO: 13872 - DNA, 31 bp, Artificial Sequence
  Description of Artificial Sequence:  Nucleic Acid
  misc_feature: DNAzyme
tgacttggggctagctacaacgaccccgaag

SEQ ID NO: 13873 - DNA, 31 bp, Artificial Sequence
  Description of Artificial Sequence:  Nucleic Acid
  misc_feature: DNAzyme
tgttgtgaggctagctacaacgattggcccc

SEQ ID NO: 13874 - DNA, 31 bp, Artificial Sequence
  Description of Artificial Sequence:  Nucleic Acid
  misc_feature: DNAzyme
caatgttgggctagctacaacgagacttggc

SEQ ID NO: 13875 - DNA, 31 bp, Artificial Sequence
  Description of Artificial Sequence:  Nucleic Acid
  misc_feature: DNAzyme
taccaatgggctagctacaacgatgtgactt

SEQ ID NO: 13876 - DNA, 31 bp, Artificial Sequence
  Description of Artificial Sequence:  Nucleic Acid
  misc_feature: DNAzyme
tttaccaaggctagctacaacgagttgtgac

SEQ ID NO: 13877 - DNA, 31 bp, Artificial Sequence
  Description of Artificial Sequence:  Nucleic Acid
  misc_feature: DNAzyme
tcaatttaggctagctacaacgacaatgttg

SEQ ID NO: 13878 - DNA, 31 bp, Artificial Sequence
  Description of Artificial Sequence:  Nucleic Acid
  misc_feature: DNAzyme
ggagtcaaggctagctacaacgattaccaat

SEQ ID NO: 13879 - DNA, 31 bp, Artificial Sequence
  Description of Artificial Sequence:  Nucleic Acid
  misc_feature: DNAzyme
tcgaggagggctagctacaacgacaatttac

SEQ ID NO: 13880 - DNA, 31 bp, Artificial Sequence
  Description of Artificial Sequence:  Nucleic Acid
  misc_feature: DNAzyme
catccgtgggctagctacaacgacgaggagt

SEQ ID NO: 13881 - DNA, 31 bp, Artificial Sequence
  Description of Artificial Sequence:  Nucleic Acid
  misc_feature: DNAzyme
gacatccgggctagctacaacgagtcgagga

SEQ ID NO: 13882 - DNA, 31 bp, Artificial Sequence
  Description of Artificial Sequence:  Nucleic Acid
  misc_feature: DNAzyme
gagtgacaggctagctacaacgaccgtgtcg

SEQ ID NO: 13883 - DNA, 31 bp, Artificial Sequence
  Description of Artificial Sequence:  Nucleic Acid
  misc_feature: DNAzyme
gagagtgaggctagctacaacgaatccgtgt

SEQ ID NO: 13884 - DNA, 31 bp, Artificial Sequence
  Description of Artificial Sequence:  Nucleic Acid
  misc_feature: DNAzyme
accgagagggctagctacaacgagacatccg

SEQ ID NO: 13885 - DNA, 31 bp, Artificial Sequence
  Description of Artificial Sequence:  Nucleic Acid
  misc_feature: DNAzyme
aacagtcaggctagctacaacgacgagagtg

SEQ ID NO: 13886 - DNA, 31 bp, Artificial Sequence
  Description of Artificial Sequence:  Nucleic Acid
  misc_feature: DNAzyme
ctcaacagggctagctacaacgacaccgaga

SEQ ID NO: 13887 - DNA, 31 bp, Artificial Sequence
  Description of Artificial Sequence:  Nucleic Acid
  misc_feature: DNAzyme
cgactcaaggctagctacaacgaagtcaccg

SEQ ID NO: 13888 - DNA, 31 bp, Artificial Sequence
  Description of Artificial Sequence:  Nucleic Acid
  misc_feature: DNAzyme
tgtttcgaggctagctacaacgatcaacagt

SEQ ID NO: 13889 - DNA, 31 bp, Artificial Sequence
  Description of Artificial Sequence:  Nucleic Acid
  misc_feature: DNAzyme
acccgctgggctagctacaacgattcgactc

SEQ ID NO: 13890 - DNA, 31 bp, Artificial Sequence
  Description of Artificial Sequence:  Nucleic Acid
  misc_feature: DNAzyme
gacacccgggctagctacaacgatgtttcga

SEQ ID NO: 13891 - DNA, 31 bp, Artificial Sequence
  Description of Artificial Sequence:  Nucleic Acid
  misc_feature: DNAzyme
atatgacaggctagctacaacgaccgctgtt

SEQ ID NO: 13892 - DNA, 31 bp, Artificial Sequence
  Description of Artificial Sequence:  Nucleic Acid
  misc_feature: DNAzyme
gcatatgaggctagctacaacgaacccgctg

SEQ ID NO: 13893 - DNA, 31 bp, Artificial Sequence
  Description of Artificial Sequence:  Nucleic Acid
  misc_feature: DNAzyme
tttgcataggctagctacaacgagacacccg

SEQ ID NO: 13894 - DNA, 31 bp, Artificial Sequence
  Description of Artificial Sequence:  Nucleic Acid
  misc_feature: DNAzyme
gctttgcaggctagctacaacgaatgacacc

SEQ ID NO: 13895 - DNA, 31 bp, Artificial Sequence
  Description of Artificial Sequence:  Nucleic Acid
  misc_feature: DNAzyme
gggctttgggctagctacaacgaatatgaca

SEQ ID NO: 13896 - DNA, 31 bp, Artificial Sequence
  Description of Artificial Sequence:  Nucleic Acid
  misc_feature: DNAzyme
cctatgggggctagctacaacgatttgcata

SEQ ID NO: 13897 - DNA, 31 bp, Artificial Sequence
  Description of Artificial Sequence:  Nucleic Acid
  misc_feature: DNAzyme
atgccctaggctagctacaacgagggctttg

SEQ ID NO: 13898 - DNA, 31 bp, Artificial Sequence
  Description of Artificial Sequence:  Nucleic Acid
  misc_feature: DNAzyme
aagaaatgggctagctacaacgacctatggg

SEQ ID NO: 13899 - DNA, 31 bp, Artificial Sequence
  Description of Artificial Sequence:  Nucleic Acid
  misc_feature: DNAzyme
caaagaaaggctagctacaacgagccctatg

SEQ ID NO: 13900 - DNA, 31 bp, Artificial Sequence
  Description of Artificial Sequence:  Nucleic Acid
  misc_feature: DNAzyme
cctggaaaggctagctacaacgacaaagaaa

SEQ ID NO: 13901 - DNA, 31 bp, Artificial Sequence
  Description of Artificial Sequence:  Nucleic Acid
  misc_feature: DNAzyme
ggtgaatgggctagctacaacgactggaaat

SEQ ID NO: 13902 - DNA, 31 bp, Artificial Sequence
  Description of Artificial Sequence:  Nucleic Acid
  misc_feature: DNAzyme
ctggtgaaggctagctacaacgagcctggaa

SEQ ID NO: 13903 - DNA, 31 bp, Artificial Sequence
  Description of Artificial Sequence:  Nucleic Acid
  misc_feature: DNAzyme
gttcctggggctagctacaacgagaatgcct

SEQ ID NO: 13904 - DNA, 31 bp, Artificial Sequence
  Description of Artificial Sequence:  Nucleic Acid
  misc_feature: DNAzyme
gggttgagggctagctacaacgatcctggtg

SEQ ID NO: 13905 - DNA, 31 bp, Artificial Sequence
  Description of Artificial Sequence:  Nucleic Acid
  misc_feature: DNAzyme
gcagcgggggctagctacaacgatgagttcc

SEQ ID NO: 13906 - DNA, 31 bp, Artificial Sequence
  Description of Artificial Sequence:  Nucleic Acid
  misc_feature: DNAzyme
ctgggcagggctagctacaacgagggttgag

SEQ ID NO: 13907 - DNA, 31 bp, Artificial Sequence
  Description of Artificial Sequence:  Nucleic Acid
  misc_feature: DNAzyme
ctcctgggggctagctacaacgaagcgggtt

SEQ ID NO: 13908 - DNA, 31 bp, Artificial Sequence
  Description of Artificial Sequence:  Nucleic Acid
  misc_feature: DNAzyme
ttccagtaggctagctacaacgatctcctgg

SEQ ID NO: 13909 - DNA, 31 bp, Artificial Sequence
  Description of Artificial Sequence:  Nucleic Acid
  misc_feature: DNAzyme
gattccagggctagctacaacgaactctcct

SEQ ID NO: 13910 - DNA, 31 bp, Artificial Sequence
  Description of Artificial Sequence:  Nucleic Acid
  misc_feature: DNAzyme
catacggaggctagctacaacgatccagtac

SEQ ID NO: 13911 - DNA, 31 bp, Artificial Sequence
  Description of Artificial Sequence:  Nucleic Acid
  misc_feature: DNAzyme
tcttcataggctagctacaacgaggattcca

SEQ ID NO: 13912 - DNA, 31 bp, Artificial Sequence
  Description of Artificial Sequence:  Nucleic Acid
  misc_feature: DNAzyme
gctcttcaggctagctacaacgaacggattc

SEQ ID NO: 13913 - DNA, 31 bp, Artificial Sequence
  Description of Artificial Sequence:  Nucleic Acid
  misc_feature: DNAzyme
gtgatgggggctagctacaacgatcttcata

SEQ ID NO: 13914 - DNA, 31 bp, Artificial Sequence
  Description of Artificial Sequence:  Nucleic Acid
  misc_feature: DNAzyme
ggccgtgaggctagctacaacgagggctctt

SEQ ID NO: 13915 - DNA, 31 bp, Artificial Sequence
  Description of Artificial Sequence:  Nucleic Acid
  misc_feature: DNAzyme
tcaggccgggctagctacaacgagatgggct

SEQ ID NO: 13916 - DNA, 31 bp, Artificial Sequence
  Description of Artificial Sequence:  Nucleic Acid
  misc_feature: DNAzyme
tcctcaggggctagctacaacgacgtgatgg

SEQ ID NO: 13917 - DNA, 31 bp, Artificial Sequence
  Description of Artificial Sequence:  Nucleic Acid
  misc_feature: DNAzyme
ggtctccaggctagctacaacgaccttcctc

SEQ ID NO: 13918 - DNA, 31 bp, Artificial Sequence
  Description of Artificial Sequence:  Nucleic Acid
  misc_feature: DNAzyme
cgacgtggggctagctacaacgactccaccc

SEQ ID NO: 13919 - DNA, 31 bp, Artificial Sequence
  Description of Artificial Sequence:  Nucleic Acid
  misc_feature: DNAzyme
ttacgacgggctagctacaacgaggtctcca

SEQ ID NO: 13920 - DNA, 31 bp, Artificial Sequence
  Description of Artificial Sequence:  Nucleic Acid
  misc_feature: DNAzyme
ctttacgaggctagctacaacgagtggtctc

SEQ ID NO: 13921 - DNA, 31 bp, Artificial Sequence
  Description of Artificial Sequence:  Nucleic Acid
  misc_feature: DNAzyme
gccctttaggctagctacaacgagacgtggt

SEQ ID NO: 13922 - DNA, 31 bp, Artificial Sequence
  Description of Artificial Sequence:  Nucleic Acid
  misc_feature: DNAzyme
gaaaatggggctagctacaacgacctttacg

SEQ ID NO: 13923 - DNA, 31 bp, Artificial Sequence
  Description of Artificial Sequence:  Nucleic Acid
  misc_feature: DNAzyme
cgagaaaaggctagctacaacgaggcccttt

SEQ ID NO: 13924 - DNA, 31 bp, Artificial Sequence
  Description of Artificial Sequence:  Nucleic Acid
  misc_feature: DNAzyme
cgtgtgtgggctagctacaacgagagaaaat

SEQ ID NO: 13925 - DNA, 31 bp, Artificial Sequence
  Description of Artificial Sequence:  Nucleic Acid
  misc_feature: DNAzyme
ttcgtgtgggctagctacaacgagcgagaaa

SEQ ID NO: 13926 - DNA, 31 bp, Artificial Sequence
  Description of Artificial Sequence:  Nucleic Acid
  misc_feature: DNAzyme
ggttcgtgggctagctacaacgagtgcgaga

SEQ ID NO: 13927 - DNA, 31 bp, Artificial Sequence
  Description of Artificial Sequence:  Nucleic Acid
  misc_feature: DNAzyme
ggggttcgggctagctacaacgagtgtgcga

SEQ ID NO: 13928 - DNA, 31 bp, Artificial Sequence
  Description of Artificial Sequence:  Nucleic Acid
  misc_feature: DNAzyme
cttgggggggctagctacaacgatcgtgtgt

SEQ ID NO: 13929 - DNA, 31 bp, Artificial Sequence
  Description of Artificial Sequence:  Nucleic Acid
  misc_feature: DNAzyme
ttcccagaggctagctacaacgattgggggt

SEQ ID NO: 13930 - DNA, 31 bp, Artificial Sequence
  Description of Artificial Sequence:  Nucleic Acid
  misc_feature: DNAzyme
ttatcgtgggctagctacaacgatcccagac

SEQ ID NO: 13931 - DNA, 31 bp, Artificial Sequence
  Description of Artificial Sequence:  Nucleic Acid
  misc_feature: DNAzyme
ccttatcgggctagctacaacgagttcccag

SEQ ID NO: 13932 - DNA, 31 bp, Artificial Sequence
  Description of Artificial Sequence:  Nucleic Acid
  misc_feature: DNAzyme
tcgccttaggctagctacaacgacgtgttcc

SEQ ID NO: 13933 - DNA, 31 bp, Artificial Sequence
  Description of Artificial Sequence:  Nucleic Acid
  misc_feature: DNAzyme
ccagctcgggctagctacaacgacttatcgt

SEQ ID NO: 13934 - DNA, 31 bp, Artificial Sequence
  Description of Artificial Sequence:  Nucleic Acid
  misc_feature: DNAzyme
caagccagggctagctacaacgatcgcctta

SEQ ID NO: 13935 - DNA, 31 bp, Artificial Sequence
  Description of Artificial Sequence:  Nucleic Acid
  misc_feature: DNAzyme
gccgcaagggctagctacaacgacagctcgc

SEQ ID NO: 13936 - DNA, 31 bp, Artificial Sequence
  Description of Artificial Sequence:  Nucleic Acid
  misc_feature: DNAzyme
ggaggccgggctagctacaacgaaagccagc

SEQ ID NO: 13937 - DNA, 31 bp, Artificial Sequence
  Description of Artificial Sequence:  Nucleic Acid
  misc_feature: DNAzyme
aaaggaggggctagctacaacgacgcaagcc

SEQ ID NO: 13938 - DNA, 31 bp, Artificial Sequence
  Description of Artificial Sequence:  Nucleic Acid
  misc_feature: DNAzyme
gcgtccaaggctagctacaacgacagagaaa

SEQ ID NO: 13939 - DNA, 31 bp, Artificial Sequence
  Description of Artificial Sequence:  Nucleic Acid
  misc_feature: DNAzyme
tttctgcgggctagctacaacgaccaaccag

SEQ ID NO: 13940 - DNA, 31 bp, Artificial Sequence
  Description of Artificial Sequence:  Nucleic Acid
  misc_feature: DNAzyme
gttttctgggctagctacaacgagtccaacc

SEQ ID NO: 13941 - DNA, 31 bp, Artificial Sequence
  Description of Artificial Sequence:  Nucleic Acid
  misc_feature: DNAzyme
aaatgaggggctagctacaacgatttctgcg

SEQ ID NO: 13942 - DNA, 31 bp, Artificial Sequence
  Description of Artificial Sequence:  Nucleic Acid
  misc_feature: DNAzyme
gcaaaaaaggctagctacaacgagaggtttt

SEQ ID NO: 13943 - DNA, 31 bp, Artificial Sequence
  Description of Artificial Sequence:  Nucleic Acid
  misc_feature: DNAzyme
catcatggggctagctacaacgaaaaaaatg

SEQ ID NO: 13944 - DNA, 31 bp, Artificial Sequence
  Description of Artificial Sequence:  Nucleic Acid
  misc_feature: DNAzyme
caccatcaggctagctacaacgaggcaaaaa

SEQ ID NO: 13945 - DNA, 31 bp, Artificial Sequence
  Description of Artificial Sequence:  Nucleic Acid
  misc_feature: DNAzyme
taccaccaggctagctacaacgacatggcaa

SEQ ID NO: 13946 - DNA, 31 bp, Artificial Sequence
  Description of Artificial Sequence:  Nucleic Acid
  misc_feature: DNAzyme
tgataccaggctagctacaacgacatcatgg

SEQ ID NO: 13947 - DNA, 31 bp, Artificial Sequence
  Description of Artificial Sequence:  Nucleic Acid
  misc_feature: DNAzyme
aattgataggctagctacaacgacaccatca

SEQ ID NO: 13948 - DNA, 31 bp, Artificial Sequence
  Description of Artificial Sequence:  Nucleic Acid
  misc_feature: DNAzyme
ccaattgaggctagctacaacgaaccaccat

SEQ ID NO: 13949 - DNA, 31 bp, Artificial Sequence
  Description of Artificial Sequence:  Nucleic Acid
  misc_feature: DNAzyme
gacaccaaggctagctacaacgatgatacca

SEQ ID NO: 13950 - DNA, 31 bp, Artificial Sequence
  Description of Artificial Sequence:  Nucleic Acid
  misc_feature: DNAzyme
ctgagacaggctagctacaacgacaattgat

SEQ ID NO: 13951 - DNA, 31 bp, Artificial Sequence
  Description of Artificial Sequence:  Nucleic Acid
  misc_feature: DNAzyme
cactgagaggctagctacaacgaaccaattg

SEQ ID NO: 13952 - DNA, 31 bp, Artificial Sequence
  Description of Artificial Sequence:  Nucleic Acid
  misc_feature: DNAzyme
ggaagacaggctagctacaacgatgagacac

SEQ ID NO: 13953 - DNA, 31 bp, Artificial Sequence
  Description of Artificial Sequence:  Nucleic Acid
  misc_feature: DNAzyme
ctggaagaggctagctacaacgaactgagac

SEQ ID NO: 13954 - DNA, 31 bp, Artificial Sequence
  Description of Artificial Sequence:  Nucleic Acid
  misc_feature: DNAzyme
aggacttgggctagctacaacgatggaagac

SEQ ID NO: 13955 - DNA, 31 bp, Artificial Sequence
  Description of Artificial Sequence:  Nucleic Acid
  misc_feature: DNAzyme
tggaaggaggctagctacaacgattgctgga

SEQ ID NO: 13956 - DNA, 31 bp, Artificial Sequence
  Description of Artificial Sequence:  Nucleic Acid
  misc_feature: DNAzyme
gctccgtgggctagctacaacgaggaaggac

SEQ ID NO: 13957 - DNA, 31 bp, Artificial Sequence
  Description of Artificial Sequence:  Nucleic Acid
  misc_feature: DNAzyme
ccgctccgggctagctacaacgagtggaagg

SEQ ID NO: 13958 - DNA, 31 bp, Artificial Sequence
  Description of Artificial Sequence:  Nucleic Acid
  misc_feature: DNAzyme
cacatccgggctagctacaacgatccgtgtg

SEQ ID NO: 13959 - DNA, 31 bp, Artificial Sequence
  Description of Artificial Sequence:  Nucleic Acid
  misc_feature: DNAzyme
caaccacaggctagctacaacgaccgctccg

SEQ ID NO: 13960 - DNA, 31 bp, Artificial Sequence
  Description of Artificial Sequence:  Nucleic Acid
  misc_feature: DNAzyme
gtcaaccaggctagctacaacgaatccgctc

SEQ ID NO: 13961 - DNA, 31 bp, Artificial Sequence
  Description of Artificial Sequence:  Nucleic Acid
  misc_feature: DNAzyme
gccgtcaaggctagctacaacgacacatccg

SEQ ID NO: 13962 - DNA, 31 bp, Artificial Sequence
  Description of Artificial Sequence:  Nucleic Acid
  misc_feature: DNAzyme
cggggccgggctagctacaacgacaaccaca

SEQ ID NO: 13963 - DNA, 31 bp, Artificial Sequence
  Description of Artificial Sequence:  Nucleic Acid
  misc_feature: DNAzyme
cagcggggggctagctacaacgacgtcaacc

SEQ ID NO: 13964 - DNA, 31 bp, Artificial Sequence
  Description of Artificial Sequence:  Nucleic Acid
  misc_feature: DNAzyme
ctatccagggctagctacaacgaggggccgt

SEQ ID NO: 13965 - DNA, 31 bp, Artificial Sequence
  Description of Artificial Sequence:  Nucleic Acid
  misc_feature: DNAzyme
ggaacctaggctagctacaacgaccagcggg

SEQ ID NO: 13966 - DNA, 31 bp, Artificial Sequence
  Description of Artificial Sequence:  Nucleic Acid
  misc_feature: DNAzyme
gtccggaaggctagctacaacgactatccag

SEQ ID NO: 13967 - DNA, 31 bp, Artificial Sequence
  Description of Artificial Sequence:  Nucleic Acid
  misc_feature: DNAzyme
aaaggacgggctagctacaacgaccggaacc

SEQ ID NO: 13968 - DNA, 31 bp, Artificial Sequence
  Description of Artificial Sequence:  Nucleic Acid
  misc_feature: DNAzyme
gcaaaggaggctagctacaacgagtccggaa

SEQ ID NO: 13969 - DNA, 31 bp, Artificial Sequence
  Description of Artificial Sequence:  Nucleic Acid
  misc_feature: DNAzyme
ttatggggggctagctacaacgaaaaggacg

SEQ ID NO: 13970 - DNA, 31 bp, Artificial Sequence
  Description of Artificial Sequence:  Nucleic Acid
  misc_feature: DNAzyme
tttggttaggctagctacaacgaggggcaaa

SEQ ID NO: 13971 - DNA, 31 bp, Artificial Sequence
  Description of Artificial Sequence:  Nucleic Acid
  misc_feature: DNAzyme
aaatttggggctagctacaacgatatggggc

SEQ ID NO: 13972 - DNA, 31 bp, Artificial Sequence
  Description of Artificial Sequence:  Nucleic Acid
  misc_feature: DNAzyme
ggtccaaaggctagctacaacgattggttat

SEQ ID NO: 13973 - DNA, 31 bp, Artificial Sequence
  Description of Artificial Sequence:  Nucleic Acid
  misc_feature: DNAzyme
cggccaggggctagctacaacgaccaaattt

SEQ ID NO: 13974 - DNA, 31 bp, Artificial Sequence
  Description of Artificial Sequence:  Nucleic Acid
  misc_feature: DNAzyme
acattcggggctagctacaacgacaggtcca

SEQ ID NO: 13975 - DNA, 31 bp, Artificial Sequence
  Description of Artificial Sequence:  Nucleic Acid
  misc_feature: DNAzyme
cccccacaggctagctacaacgatcggccag

SEQ ID NO: 13976 - DNA, 31 bp, Artificial Sequence
  Description of Artificial Sequence:  Nucleic Acid
  misc_feature: DNAzyme
cgcccccaggctagctacaacgaattcggcc

SEQ ID NO: 13977 - DNA, 31 bp, Artificial Sequence
  Description of Artificial Sequence:  Nucleic Acid
  misc_feature: DNAzyme
gactgacgggctagctacaacgaccccacat

SEQ ID NO: 13978 - DNA, 31 bp, Artificial Sequence
  Description of Artificial Sequence:  Nucleic Acid
  misc_feature: DNAzyme
cagactgaggctagctacaacgagcccccac

SEQ ID NO: 13979 - DNA, 31 bp, Artificial Sequence
  Description of Artificial Sequence:  Nucleic Acid
  misc_feature: DNAzyme
cctgcagaggctagctacaacgatgacgccc

SEQ ID NO: 13980 - DNA, 31 bp, Artificial Sequence
  Description of Artificial Sequence:  Nucleic Acid
  misc_feature: DNAzyme
gaagcctgggctagctacaacgaagactgac

SEQ ID NO: 13981 - DNA, 31 bp, Artificial Sequence
  Description of Artificial Sequence:  Nucleic Acid
  misc_feature: DNAzyme
agaggaagggctagctacaacgactgcagac

SEQ ID NO: 13982 - DNA, 31 bp, Artificial Sequence
  Description of Artificial Sequence:  Nucleic Acid
  misc_feature: DNAzyme
tctatccgggctagctacaacgaagaggaag

SEQ ID NO: 13983 - DNA, 31 bp, Artificial Sequence
  Description of Artificial Sequence:  Nucleic Acid
  misc_feature: DNAzyme
aacttctaggctagctacaacgaccgtagag

SEQ ID NO: 13984 - DNA, 31 bp, Artificial Sequence
  Description of Artificial Sequence:  Nucleic Acid
  misc_feature: DNAzyme
aggctaaaggctagctacaacgattctatcc

SEQ ID NO: 13985 - DNA, 31 bp, Artificial Sequence
  Description of Artificial Sequence:  Nucleic Acid
  misc_feature: DNAzyme
agttaaggggctagctacaacgataaacttc

SEQ ID NO: 13986 - DNA, 31 bp, Artificial Sequence
  Description of Artificial Sequence:  Nucleic Acid
  misc_feature: DNAzyme
gtccacagggctagctacaacgataaggcta

SEQ ID NO: 13987 - DNA, 31 bp, Artificial Sequence
  Description of Artificial Sequence:  Nucleic Acid
  misc_feature: DNAzyme
ggcgtccaggctagctacaacgaagttaagg

SEQ ID NO: 13988 - DNA, 31 bp, Artificial Sequence
  Description of Artificial Sequence:  Nucleic Acid
  misc_feature: DNAzyme
cgaaggcgggctagctacaacgaccacagtt

SEQ ID NO: 13989 - DNA, 31 bp, Artificial Sequence
  Description of Artificial Sequence:  Nucleic Acid
  misc_feature: DNAzyme
ggcgaaggggctagctacaacgagtccacag

SEQ ID NO: 13990 - DNA, 31 bp, Artificial Sequence
  Description of Artificial Sequence:  Nucleic Acid
  misc_feature: DNAzyme
gatgaaggggctagctacaacgagaaggcgt

SEQ ID NO: 13991 - DNA, 31 bp, Artificial Sequence
  Description of Artificial Sequence:  Nucleic Acid
  misc_feature: DNAzyme
caaggagaggctagctacaacgagaaggcga

SEQ ID NO: 13992 - DNA, 31 bp, Artificial Sequence
  Description of Artificial Sequence:  Nucleic Acid
  misc_feature: DNAzyme
gggacgtgggctagctacaacgatcaaggag

SEQ ID NO: 13993 - DNA, 31 bp, Artificial Sequence
  Description of Artificial Sequence:  Nucleic Acid
  misc_feature: DNAzyme
ccgggacgggctagctacaacgagctcaagg

SEQ ID NO: 13994 - DNA, 31 bp, Artificial Sequence
  Description of Artificial Sequence:  Nucleic Acid
  misc_feature: DNAzyme
taccgggaggctagctacaacgagtgctcaa

SEQ ID NO: 13995 - DNA, 31 bp, Artificial Sequence
  Description of Artificial Sequence:  Nucleic Acid
  misc_feature: DNAzyme
gaccactaggctagctacaacgacgggacgt

SEQ ID NO: 13996 - DNA, 31 bp, Artificial Sequence
  Description of Artificial Sequence:  Nucleic Acid
  misc_feature: DNAzyme
gacgaccaggctagctacaacgataccggga

SEQ ID NO: 13997 - DNA, 31 bp, Artificial Sequence
  Description of Artificial Sequence:  Nucleic Acid
  misc_feature: DNAzyme
ctggacgaggctagctacaacgacactaccg

SEQ ID NO: 13998 - DNA, 31 bp, Artificial Sequence
  Description of Artificial Sequence:  Nucleic Acid
  misc_feature: DNAzyme
gtcctggaggctagctacaacgagaccacta

SEQ ID NO: 13999 - DNA, 31 bp, Artificial Sequence
  Description of Artificial Sequence:  Nucleic Acid
  misc_feature: DNAzyme
actgcaagggctagctacaacgacctggacg

SEQ ID NO: 14000 - DNA, 31 bp, Artificial Sequence
  Description of Artificial Sequence:  Nucleic Acid
  misc_feature: DNAzyme
acagactgggctagctacaacgaaagtcctg

SEQ ID NO: 14001 - DNA, 31 bp, Artificial Sequence
  Description of Artificial Sequence:  Nucleic Acid
  misc_feature: DNAzyme
ttgacagaggctagctacaacgatgcaagtc

SEQ ID NO: 14002 - DNA, 31 bp, Artificial Sequence
  Description of Artificial Sequence:  Nucleic Acid
  misc_feature: DNAzyme
acctttgaggctagctacaacgaagactgca

SEQ ID NO: 14003 - DNA, 31 bp, Artificial Sequence
  Description of Artificial Sequence:  Nucleic Acid
  misc_feature: DNAzyme
gaaggtcaggctagctacaacgactttgaca

SEQ ID NO: 14004 - DNA, 31 bp, Artificial Sequence
  Description of Artificial Sequence:  Nucleic Acid
  misc_feature: DNAzyme
gaagaaggggctagctacaacgacacctttg

SEQ ID NO: 14005 - DNA, 31 bp, Artificial Sequence
  Description of Artificial Sequence:  Nucleic Acid
  misc_feature: DNAzyme
gccagcggggctagctacaacgaagaagaag

SEQ ID NO: 14006 - DNA, 31 bp, Artificial Sequence
  Description of Artificial Sequence:  Nucleic Acid
  misc_feature: DNAzyme
caagccagggctagctacaacgaggcagaag

SEQ ID NO: 14007 - DNA, 31 bp, Artificial Sequence
  Description of Artificial Sequence:  Nucleic Acid
  misc_feature: DNAzyme
agcgcaagggctagctacaacgacagcggca

SEQ ID NO: 14008 - DNA, 31 bp, Artificial Sequence
  Description of Artificial Sequence:  Nucleic Acid
  misc_feature: DNAzyme
tcgcagcgggctagctacaacgaaagccagc

SEQ ID NO: 14009 - DNA, 31 bp, Artificial Sequence
  Description of Artificial Sequence:  Nucleic Acid
  misc_feature: DNAzyme
tctcgcagggctagctacaacgagcaagcca

SEQ ID NO: 14010 - DNA, 31 bp, Artificial Sequence
  Description of Artificial Sequence:  Nucleic Acid
  misc_feature: DNAzyme
acatctcgggctagctacaacgaagcgcaag

SEQ ID NO: 14011 - DNA, 31 bp, Artificial Sequence
  Description of Artificial Sequence:  Nucleic Acid
  misc_feature: DNAzyme
ctacaacaggctagctacaacgactcgcagc

SEQ ID NO: 14012 - DNA, 31 bp, Artificial Sequence
  Description of Artificial Sequence:  Nucleic Acid
  misc_feature: DNAzyme
cgctacaaggctagctacaacgaatctcgca

SEQ ID NO: 14013 - DNA, 31 bp, Artificial Sequence
  Description of Artificial Sequence:  Nucleic Acid
  misc_feature: DNAzyme
ctacgctaggctagctacaacgaaacatctc

SEQ ID NO: 14014 - DNA, 31 bp, Artificial Sequence
  Description of Artificial Sequence:  Nucleic Acid
  misc_feature: DNAzyme
ggtctacgggctagctacaacgatacaacat

SEQ ID NO: 14015 - DNA, 31 bp, Artificial Sequence
  Description of Artificial Sequence:  Nucleic Acid
  misc_feature: DNAzyme
atggtctaggctagctacaacgagctacaac

SEQ ID NO: 14016 - DNA, 31 bp, Artificial Sequence
  Description of Artificial Sequence:  Nucleic Acid
  misc_feature: DNAzyme
caacatggggctagctacaacgactacgcta

SEQ ID NO: 14017 - DNA, 31 bp, Artificial Sequence
  Description of Artificial Sequence:  Nucleic Acid
  misc_feature: DNAzyme
ccacaacaggctagctacaacgaggtctacg

SEQ ID NO: 14018 - DNA, 31 bp, Artificial Sequence
  Description of Artificial Sequence:  Nucleic Acid
  misc_feature: DNAzyme
caccacaaggctagctacaacgaatggtcta

SEQ ID NO: 14019 - DNA, 31 bp, Artificial Sequence
  Description of Artificial Sequence:  Nucleic Acid
  misc_feature: DNAzyme
cgtcaccaggctagctacaacgaaacatggt

SEQ ID NO: 14020 - DNA, 31 bp, Artificial Sequence
  Description of Artificial Sequence:  Nucleic Acid
  misc_feature: DNAzyme
ctgcgtcaggctagctacaacgacacaacat

SEQ ID NO: 14021 - DNA, 31 bp, Artificial Sequence
  Description of Artificial Sequence:  Nucleic Acid
  misc_feature: DNAzyme
ttgctgcgggctagctacaacgacaccacaa

SEQ ID NO: 14022 - DNA, 31 bp, Artificial Sequence
  Description of Artificial Sequence:  Nucleic Acid
  misc_feature: DNAzyme
ctttgctgggctagctacaacgagtcaccac

SEQ ID NO: 14023 - DNA, 31 bp, Artificial Sequence
  Description of Artificial Sequence:  Nucleic Acid
  misc_feature: DNAzyme
actctttgggctagctacaacgatgcgtcac

SEQ ID NO: 14024 - DNA, 31 bp, Artificial Sequence
  Description of Artificial Sequence:  Nucleic Acid
  misc_feature: DNAzyme
ttgagcaaggctagctacaacgatctttgct

SEQ ID NO: 14025 - DNA, 31 bp, Artificial Sequence
  Description of Artificial Sequence:  Nucleic Acid
  misc_feature: DNAzyme
gcgttgagggctagctacaacgaaactcttt

SEQ ID NO: 14026 - DNA, 31 bp, Artificial Sequence
  Description of Artificial Sequence:  Nucleic Acid
  misc_feature: DNAzyme
tcaacgcgggctagctacaacgatgagcaac

SEQ ID NO: 14027 - DNA, 31 bp, Artificial Sequence
  Description of Artificial Sequence:  Nucleic Acid
  misc_feature: DNAzyme
catcaacgggctagctacaacgagttgagca

SEQ ID NO: 14028 - DNA, 31 bp, Artificial Sequence
  Description of Artificial Sequence:  Nucleic Acid
  misc_feature: DNAzyme
cccatcaaggctagctacaacgagcgttgag

SEQ ID NO: 14029 - DNA, 31 bp, Artificial Sequence
  Description of Artificial Sequence:  Nucleic Acid
  misc_feature: DNAzyme
gttgcccaggctagctacaacgacaacgcgt

SEQ ID NO: 14030 - DNA, 31 bp, Artificial Sequence
  Description of Artificial Sequence:  Nucleic Acid
  misc_feature: DNAzyme
gcaagttgggctagctacaacgaccatcaac

SEQ ID NO: 14031 - DNA, 31 bp, Artificial Sequence
  Description of Artificial Sequence:  Nucleic Acid
  misc_feature: DNAzyme
aaagcaagggctagctacaacgatgcccatc

SEQ ID NO: 14032 - DNA, 31 bp, Artificial Sequence
  Description of Artificial Sequence:  Nucleic Acid
  misc_feature: DNAzyme
gaggaaagggctagctacaacgaaagttgcc

SEQ ID NO: 14033 - DNA, 31 bp, Artificial Sequence
  Description of Artificial Sequence:  Nucleic Acid
  misc_feature: DNAzyme
atgcgctgggctagctacaacgaggaggaaa

SEQ ID NO: 14034 - DNA, 31 bp, Artificial Sequence
  Description of Artificial Sequence:  Nucleic Acid
  misc_feature: DNAzyme
gccatgcgggctagctacaacgatgcggagg

SEQ ID NO: 14035 - DNA, 31 bp, Artificial Sequence
  Description of Artificial Sequence:  Nucleic Acid
  misc_feature: DNAzyme
acgccatgggctagctacaacgagctgcgga

SEQ ID NO: 14036 - DNA, 31 bp, Artificial Sequence
  Description of Artificial Sequence:  Nucleic Acid
  misc_feature: DNAzyme
tcacgccaggctagctacaacgagcgctgcg

SEQ ID NO: 14037 - DNA, 31 bp, Artificial Sequence
  Description of Artificial Sequence:  Nucleic Acid
  misc_feature: DNAzyme
tgatcacgggctagctacaacgacatgcgct

SEQ ID NO: 14038 - DNA, 31 bp, Artificial Sequence
  Description of Artificial Sequence:  Nucleic Acid
  misc_feature: DNAzyme
cctgatcaggctagctacaacgagccatgcg

SEQ ID NO: 14039 - DNA, 31 bp, Artificial Sequence
  Description of Artificial Sequence:  Nucleic Acid
  misc_feature: DNAzyme
cgccctgaggctagctacaacgacacgccat

SEQ ID NO: 14040 - DNA, 31 bp, Artificial Sequence
  Description of Artificial Sequence:  Nucleic Acid
  misc_feature: DNAzyme
gacgggcgggctagctacaacgacctgatca

SEQ ID NO: 14041 - DNA, 31 bp, Artificial Sequence
  Description of Artificial Sequence:  Nucleic Acid
  misc_feature: DNAzyme
tggacgggggctagctacaacgagccctgat

SEQ ID NO: 14042 - DNA, 31 bp, Artificial Sequence
  Description of Artificial Sequence:  Nucleic Acid
  misc_feature: DNAzyme
cacatggaggctagctacaacgagggcgccc

SEQ ID NO: 14043 - DNA, 31 bp, Artificial Sequence
  Description of Artificial Sequence:  Nucleic Acid
  misc_feature: DNAzyme
cctacacaggctagctacaacgaggacgggc

SEQ ID NO: 14044 - DNA, 31 bp, Artificial Sequence
  Description of Artificial Sequence:  Nucleic Acid
  misc_feature: DNAzyme
gtcctacaggctagctacaacgaatggacgg

SEQ ID NO: 14045 - DNA, 31 bp, Artificial Sequence
  Description of Artificial Sequence:  Nucleic Acid
  misc_feature: DNAzyme
atgtcctaggctagctacaacgaacatggac

SEQ ID NO: 14046 - DNA, 31 bp, Artificial Sequence
  Description of Artificial Sequence:  Nucleic Acid
  misc_feature: DNAzyme
gctcgatgggctagctacaacgacctacaca

SEQ ID NO: 14047 - DNA, 31 bp, Artificial Sequence
  Description of Artificial Sequence:  Nucleic Acid
  misc_feature: DNAzyme
ctgctcgaggctagctacaacgagtcctaca

SEQ ID NO: 14048 - DNA, 31 bp, Artificial Sequence
  Description of Artificial Sequence:  Nucleic Acid
  misc_feature: DNAzyme
gtctgctgggctagctacaacgatcgatgtc

SEQ ID NO: 14049 - DNA, 31 bp, Artificial Sequence
  Description of Artificial Sequence:  Nucleic Acid
  misc_feature: DNAzyme
gtcgtctgggctagctacaacgatgctcgat

SEQ ID NO: 14050 - DNA, 31 bp, Artificial Sequence
  Description of Artificial Sequence:  Nucleic Acid
  misc_feature: DNAzyme
ggatgtcgggctagctacaacgactgctgct

SEQ ID NO: 14051 - DNA, 31 bp, Artificial Sequence
  Description of Artificial Sequence:  Nucleic Acid
  misc_feature: DNAzyme
cgaggatgggctagctacaacgacgtctgct

SEQ ID NO: 14052 - DNA, 31 bp, Artificial Sequence
  Description of Artificial Sequence:  Nucleic Acid
  misc_feature: DNAzyme
ggcgaggaggctagctacaacgagtcgtctg

SEQ ID NO: 14053 - DNA, 31 bp, Artificial Sequence
  Description of Artificial Sequence:  Nucleic Acid
  misc_feature: DNAzyme
gaggctggggctagctacaacgagaggatgt

SEQ ID NO: 14054 - DNA, 31 bp, Artificial Sequence
  Description of Artificial Sequence:  Nucleic Acid
  misc_feature: DNAzyme
cgaagaggggctagctacaacgatggcgagg

SEQ ID NO: 14055 - DNA, 31 bp, Artificial Sequence
  Description of Artificial Sequence:  Nucleic Acid
  misc_feature: DNAzyme
accgtgagggctagctacaacgagaagaggc

SEQ ID NO: 14056 - DNA, 31 bp, Artificial Sequence
  Description of Artificial Sequence:  Nucleic Acid
  misc_feature: DNAzyme
gtctaccgggctagctacaacgagagcgaag

SEQ ID NO: 14057 - DNA, 31 bp, Artificial Sequence
  Description of Artificial Sequence:  Nucleic Acid
  misc_feature: DNAzyme
ttggtctaggctagctacaacgacgtgagcg

SEQ ID NO: 14058 - DNA, 31 bp, Artificial Sequence
  Description of Artificial Sequence:  Nucleic Acid
  misc_feature: DNAzyme
ggtcttggggctagctacaacgactaccgtg

SEQ ID NO: 14059 - DNA, 31 bp, Artificial Sequence
  Description of Artificial Sequence:  Nucleic Acid
  misc_feature: DNAzyme
gcgacgggggctagctacaacgacttggtct

SEQ ID NO: 14060 - DNA, 31 bp, Artificial Sequence
  Description of Artificial Sequence:  Nucleic Acid
  misc_feature: DNAzyme
ctcagcgaggctagctacaacgagggtcttg

SEQ ID NO: 14061 - DNA, 31 bp, Artificial Sequence
  Description of Artificial Sequence:  Nucleic Acid
  misc_feature: DNAzyme
gatctcagggctagctacaacgagacgggtc

SEQ ID NO: 14062 - DNA, 31 bp, Artificial Sequence
  Description of Artificial Sequence:  Nucleic Acid
  misc_feature: DNAzyme
gatcccgaggctagctacaacgactcagcga

SEQ ID NO: 14063 - DNA, 31 bp, Artificial Sequence
  Description of Artificial Sequence:  Nucleic Acid
  misc_feature: DNAzyme
ccgggggaggctagctacaacgacccgatct

SEQ ID NO: 14064 - DNA, 31 bp, Artificial Sequence
  Description of Artificial Sequence:  Nucleic Acid
  misc_feature: DNAzyme
agggggagggctagctacaacgacgggggat

SEQ ID NO: 14065 - DNA, 31 bp, Artificial Sequence
  Description of Artificial Sequence:  Nucleic Acid
  misc_feature: DNAzyme
cctctatgggctagctacaacgacccccctt

SEQ ID NO: 14066 - DNA, 31 bp, Artificial Sequence
  Description of Artificial Sequence:  Nucleic Acid
  misc_feature: DNAzyme
ctcctctaggctagctacaacgagccccccc

SEQ ID NO: 14067 - DNA, 31 bp, Artificial Sequence
  Description of Artificial Sequence:  Nucleic Acid
  misc_feature: DNAzyme
gagtcgtaggctagctacaacgatcctctat

SEQ ID NO: 14068 - DNA, 31 bp, Artificial Sequence
  Description of Artificial Sequence:  Nucleic Acid
  misc_feature: DNAzyme
ttgagtcgggctagctacaacgaactcctct

SEQ ID NO: 14069 - DNA, 31 bp, Artificial Sequence
  Description of Artificial Sequence:  Nucleic Acid
  misc_feature: DNAzyme
acgttgagggctagctacaacgacgtactcc

SEQ ID NO: 14070 - DNA, 31 bp, Artificial Sequence
  Description of Artificial Sequence:  Nucleic Acid
  misc_feature: DNAzyme
atccgacgggctagctacaacgatgagtcgt

SEQ ID NO: 14071 - DNA, 31 bp, Artificial Sequence
  Description of Artificial Sequence:  Nucleic Acid
  misc_feature: DNAzyme
ggatccgaggctagctacaacgagttgagtc

SEQ ID NO: 14072 - DNA, 31 bp, Artificial Sequence
  Description of Artificial Sequence:  Nucleic Acid
  misc_feature: DNAzyme
acgcaggaggctagctacaacgaccgacgtt

SEQ ID NO: 14073 - DNA, 31 bp, Artificial Sequence
  Description of Artificial Sequence:  Nucleic Acid
  misc_feature: DNAzyme
cggtgacgggctagctacaacgaaggatccg

SEQ ID NO: 14074 - DNA, 31 bp, Artificial Sequence
  Description of Artificial Sequence:  Nucleic Acid
  misc_feature: DNAzyme
gacggtgaggctagctacaacgagcaggatc

SEQ ID NO: 14075 - DNA, 31 bp, Artificial Sequence
  Description of Artificial Sequence:  Nucleic Acid
  misc_feature: DNAzyme
aatgacggggctagctacaacgagacgcagg

SEQ ID NO: 14076 - DNA, 31 bp, Artificial Sequence
  Description of Artificial Sequence:  Nucleic Acid
  misc_feature: DNAzyme
tccaatgaggctagctacaacgaggtgacgc

SEQ ID NO: 14077 - DNA, 31 bp, Artificial Sequence
  Description of Artificial Sequence:  Nucleic Acid
  misc_feature: DNAzyme
acctccaaggctagctacaacgagacggtga

SEQ ID NO: 14078 - DNA, 31 bp, Artificial Sequence
  Description of Artificial Sequence:  Nucleic Acid
  misc_feature: DNAzyme
cgaccagaggctagctacaacgactccaatg

SEQ ID NO: 14079 - DNA, 31 bp, Artificial Sequence
  Description of Artificial Sequence:  Nucleic Acid
  misc_feature: DNAzyme
ccccccgaggctagctacaacgacagacctc

SEQ ID NO: 14080 - DNA, 31 bp, Artificial Sequence
  Description of Artificial Sequence:  Nucleic Acid
  misc_feature: DNAzyme
ggcaaccgggctagctacaacgacccccccg

SEQ ID NO: 14081 - DNA, 31 bp, Artificial Sequence
  Description of Artificial Sequence:  Nucleic Acid
  misc_feature: DNAzyme
tacggcaaggctagctacaacgacgcccccc

SEQ ID NO: 14082 - DNA, 31 bp, Artificial Sequence
  Description of Artificial Sequence:  Nucleic Acid
  misc_feature: DNAzyme
aggtacggggctagctacaacgaaaccgccc

SEQ ID NO: 14083 - DNA, 31 bp, Artificial Sequence
  Description of Artificial Sequence:  Nucleic Acid
  misc_feature: DNAzyme
tagaggtaggctagctacaacgaggcaaccg

SEQ ID NO: 14084 - DNA, 31 bp, Artificial Sequence
  Description of Artificial Sequence:  Nucleic Acid
  misc_feature: DNAzyme
gatagaggggctagctacaacgaacggcaac

SEQ ID NO: 14085 - DNA, 31 bp, Artificial Sequence
  Description of Artificial Sequence:  Nucleic Acid
  misc_feature: DNAzyme
gccgctgaggctagctacaacgaagaggtac

SEQ ID NO: 14086 - DNA, 31 bp, Artificial Sequence
  Description of Artificial Sequence:  Nucleic Acid
  misc_feature: DNAzyme
atcggccgggctagctacaacgatgatagag

SEQ ID NO: 14087 - DNA, 31 bp, Artificial Sequence
  Description of Artificial Sequence:  Nucleic Acid
  misc_feature: DNAzyme
atcatcggggctagctacaacgacgctgata

SEQ ID NO: 14088 - DNA, 31 bp, Artificial Sequence
  Description of Artificial Sequence:  Nucleic Acid
  misc_feature: DNAzyme
ctgaatcaggctagctacaacgacggccgct

SEQ ID NO: 14089 - DNA, 31 bp, Artificial Sequence
  Description of Artificial Sequence:  Nucleic Acid
  misc_feature: DNAzyme
gctctgaaggctagctacaacgacatcggcc

SEQ ID NO: 14090 - DNA, 31 bp, Artificial Sequence
  Description of Artificial Sequence:  Nucleic Acid
  misc_feature: DNAzyme
ttcggcagggctagctacaacgatctgaatc

SEQ ID NO: 14091 - DNA, 31 bp, Artificial Sequence
  Description of Artificial Sequence:  Nucleic Acid
  misc_feature: DNAzyme
accttcggggctagctacaacgaagctctga

SEQ ID NO: 14092 - DNA, 31 bp, Artificial Sequence
  Description of Artificial Sequence:  Nucleic Acid
  misc_feature: DNAzyme
cacaaagaggctagctacaacgacttcggca

SEQ ID NO: 14093 - DNA, 31 bp, Artificial Sequence
  Description of Artificial Sequence:  Nucleic Acid
  misc_feature: DNAzyme
gctcgccaggctagctacaacgaaaagacct

SEQ ID NO: 14094 - DNA, 31 bp, Artificial Sequence
  Description of Artificial Sequence:  Nucleic Acid
  misc_feature: DNAzyme
ggagctcgggctagctacaacgacacaaaga

SEQ ID NO: 14095 - DNA, 31 bp, Artificial Sequence
  Description of Artificial Sequence:  Nucleic Acid
  misc_feature: DNAzyme
tggcggagggctagctacaacgatcgccaca

SEQ ID NO: 14096 - DNA, 31 bp, Artificial Sequence
  Description of Artificial Sequence:  Nucleic Acid
  misc_feature: DNAzyme
tgccttggggctagctacaacgaggagctcg

SEQ ID NO: 14097 - DNA, 31 bp, Artificial Sequence
  Description of Artificial Sequence:  Nucleic Acid
  misc_feature: DNAzyme
gtcttctgggctagctacaacgacttggcgg

SEQ ID NO: 14098 - DNA, 31 bp, Artificial Sequence
  Description of Artificial Sequence:  Nucleic Acid
  misc_feature: DNAzyme
ccaccgtgggctagctacaacgacttctgcc

SEQ ID NO: 14099 - DNA, 31 bp, Artificial Sequence
  Description of Artificial Sequence:  Nucleic Acid
  misc_feature: DNAzyme
gtccaccgggctagctacaacgagtcttctg

SEQ ID NO: 14100 - DNA, 31 bp, Artificial Sequence
  Description of Artificial Sequence:  Nucleic Acid
  misc_feature: DNAzyme
agagtccaggctagctacaacgacgtgtctt

SEQ ID NO: 14101 - DNA, 31 bp, Artificial Sequence
  Description of Artificial Sequence:  Nucleic Acid
  misc_feature: DNAzyme
tgacagagggctagctacaacgaccaccgtg

SEQ ID NO: 14102 - DNA, 31 bp, Artificial Sequence
  Description of Artificial Sequence:  Nucleic Acid
  misc_feature: DNAzyme
tgttctgaggctagctacaacgaagagtcca

SEQ ID NO: 14103 - DNA, 31 bp, Artificial Sequence
  Description of Artificial Sequence:  Nucleic Acid
  misc_feature: DNAzyme
gacggttgggctagctacaacgatctgacag

SEQ ID NO: 14104 - DNA, 31 bp, Artificial Sequence
  Description of Artificial Sequence:  Nucleic Acid
  misc_feature: DNAzyme
gaggacggggctagctacaacgatgttctga

SEQ ID NO: 14105 - DNA, 31 bp, Artificial Sequence
  Description of Artificial Sequence:  Nucleic Acid
  misc_feature: DNAzyme
gaagaggaggctagctacaacgaggttgttc

SEQ ID NO: 14106 - DNA, 31 bp, Artificial Sequence
  Description of Artificial Sequence:  Nucleic Acid
  misc_feature: DNAzyme
cacctccaggctagctacaacgaggaggaag

SEQ ID NO: 14107 - DNA, 31 bp, Artificial Sequence
  Description of Artificial Sequence:  Nucleic Acid
  misc_feature: DNAzyme
caataccaggctagctacaacgactccacgg

SEQ ID NO: 14108 - DNA, 31 bp, Artificial Sequence
  Description of Artificial Sequence:  Nucleic Acid
  misc_feature: DNAzyme
ctccaataggctagctacaacgacacctcca

SEQ ID NO: 14109 - DNA, 31 bp, Artificial Sequence
  Description of Artificial Sequence:  Nucleic Acid
  misc_feature: DNAzyme
ccctccaaggctagctacaacgaaccacctc

SEQ ID NO: 14110 - DNA, 31 bp, Artificial Sequence
  Description of Artificial Sequence:  Nucleic Acid
  misc_feature: DNAzyme
tgccaaggggctagctacaacgaccctccaa

SEQ ID NO: 14111 - DNA, 31 bp, Artificial Sequence
  Description of Artificial Sequence:  Nucleic Acid
  misc_feature: DNAzyme
gccacctgggctagctacaacgacaaggccc

SEQ ID NO: 14112 - DNA, 31 bp, Artificial Sequence
  Description of Artificial Sequence:  Nucleic Acid
  misc_feature: DNAzyme
cattgccaggctagctacaacgactgccaag

SEQ ID NO: 14113 - DNA, 31 bp, Artificial Sequence
  Description of Artificial Sequence:  Nucleic Acid
  misc_feature: DNAzyme
gcccattgggctagctacaacgacacctgcc

SEQ ID NO: 14114 - DNA, 31 bp, Artificial Sequence
  Description of Artificial Sequence:  Nucleic Acid
  misc_feature: DNAzyme
ggtgcccaggctagctacaacgatgccacct

SEQ ID NO: 14115 - DNA, 31 bp, Artificial Sequence
  Description of Artificial Sequence:  Nucleic Acid
  misc_feature: DNAzyme
cacgggtgggctagctacaacgaccattgcc

SEQ ID NO: 14116 - DNA, 31 bp, Artificial Sequence
  Description of Artificial Sequence:  Nucleic Acid
  misc_feature: DNAzyme
tacacgggggctagctacaacgagcccattg

SEQ ID NO: 14117 - DNA, 31 bp, Artificial Sequence
  Description of Artificial Sequence:  Nucleic Acid
  misc_feature: DNAzyme
gtggtacaggctagctacaacgagggtgccc

SEQ ID NO: 14118 - DNA, 31 bp, Artificial Sequence
  Description of Artificial Sequence:  Nucleic Acid
  misc_feature: DNAzyme
cggtggtaggctagctacaacgaacgggtgc

SEQ ID NO: 14119 - DNA, 31 bp, Artificial Sequence
  Description of Artificial Sequence:  Nucleic Acid
  misc_feature: DNAzyme
tccggtggggctagctacaacgaacacgggt

SEQ ID NO: 14120 - DNA, 31 bp, Artificial Sequence
  Description of Artificial Sequence:  Nucleic Acid
  misc_feature: DNAzyme
ccctccggggctagctacaacgaggtacacg

SEQ ID NO: 14121 - DNA, 31 bp, Artificial Sequence
  Description of Artificial Sequence:  Nucleic Acid
  misc_feature: DNAzyme
agactacgggctagctacaacgaccctccgg

SEQ ID NO: 14122 - DNA, 31 bp, Artificial Sequence
  Description of Artificial Sequence:  Nucleic Acid
  misc_feature: DNAzyme
ccagactaggctagctacaacgagtccctcc

SEQ ID NO: 14123 - DNA, 31 bp, Artificial Sequence
  Description of Artificial Sequence:  Nucleic Acid
  misc_feature: DNAzyme
gacccagaggctagctacaacgatacgtccc

SEQ ID NO: 14124 - DNA, 31 bp, Artificial Sequence
  Description of Artificial Sequence:  Nucleic Acid
  misc_feature: DNAzyme
tggaaagaggctagctacaacgaccagacta

SEQ ID NO: 14125 - DNA, 31 bp, Artificial Sequence
  Description of Artificial Sequence:  Nucleic Acid
  misc_feature: DNAzyme
tactagagggctagctacaacgacctggaaa

SEQ ID NO: 14126 - DNA, 31 bp, Artificial Sequence
  Description of Artificial Sequence:  Nucleic Acid
  misc_feature: DNAzyme
ctccactaggctagctacaacgatagagccc

SEQ ID NO: 14127 - DNA, 31 bp, Artificial Sequence
  Description of Artificial Sequence:  Nucleic Acid
  misc_feature: DNAzyme
accctccaggctagctacaacgatactagag

SEQ ID NO: 14128 - DNA, 31 bp, Artificial Sequence
  Description of Artificial Sequence:  Nucleic Acid
  misc_feature: DNAzyme
gattacaaggctagctacaacgacctccact

SEQ ID NO: 14129 - DNA, 31 bp, Artificial Sequence
  Description of Artificial Sequence:  Nucleic Acid
  misc_feature: DNAzyme
ccggattaggctagctacaacgaaaccctcc

SEQ ID NO: 14130 - DNA, 31 bp, Artificial Sequence
  Description of Artificial Sequence:  Nucleic Acid
  misc_feature: DNAzyme
cgcccggaggctagctacaacgatacaaccc

SEQ ID NO: 14131 - DNA, 31 bp, Artificial Sequence
  Description of Artificial Sequence:  Nucleic Acid
  misc_feature: DNAzyme
tgggcacgggctagctacaacgaccggatta

SEQ ID NO: 14132 - DNA, 31 bp, Artificial Sequence
  Description of Artificial Sequence:  Nucleic Acid
  misc_feature: DNAzyme
tatgggcaggctagctacaacgagcccggat

SEQ ID NO: 14133 - DNA, 31 bp, Artificial Sequence
  Description of Artificial Sequence:  Nucleic Acid
  misc_feature: DNAzyme
catatgggggctagctacaacgaacgcccgg

SEQ ID NO: 14134 - DNA, 31 bp, Artificial Sequence
  Description of Artificial Sequence:  Nucleic Acid
  misc_feature: DNAzyme
tacccataggctagctacaacgagggcacgc

SEQ ID NO: 14135 - DNA, 31 bp, Artificial Sequence
  Description of Artificial Sequence:  Nucleic Acid
  misc_feature: DNAzyme
gttacccaggctagctacaacgaatgggcac

SEQ ID NO: 14136 - DNA, 31 bp, Artificial Sequence
  Description of Artificial Sequence:  Nucleic Acid
  misc_feature: DNAzyme
cagcgttaggctagctacaacgaccatatgg

SEQ ID NO: 14137 - DNA, 31 bp, Artificial Sequence
  Description of Artificial Sequence:  Nucleic Acid
  misc_feature: DNAzyme
cttcagcgggctagctacaacgatacccata

SEQ ID NO: 14138 - DNA, 31 bp, Artificial Sequence
  Description of Artificial Sequence:  Nucleic Acid
  misc_feature: DNAzyme
tccttcagggctagctacaacgagttaccca

SEQ ID NO: 14139 - DNA, 31 bp, Artificial Sequence
  Description of Artificial Sequence:  Nucleic Acid
  misc_feature: DNAzyme
ccaagaagggctagctacaacgattccttca

SEQ ID NO: 14140 - DNA, 31 bp, Artificial Sequence
  Description of Artificial Sequence:  Nucleic Acid
  misc_feature: DNAzyme
tgcggaaaggctagctacaacgaccaagaag

SEQ ID NO: 14141 - DNA, 31 bp, Artificial Sequence
  Description of Artificial Sequence:  Nucleic Acid
  misc_feature: DNAzyme
agatcctgggctagctacaacgaggaaatcc

SEQ ID NO: 14142 - DNA, 31 bp, Artificial Sequence
  Description of Artificial Sequence:  Nucleic Acid
  misc_feature: DNAzyme
ggcggagaggctagctacaacgacctgcgga

SEQ ID NO: 14143 - DNA, 31 bp, Artificial Sequence
  Description of Artificial Sequence:  Nucleic Acid
  misc_feature: DNAzyme
cattccggggctagctacaacgaggagatcc

SEQ ID NO: 14144 - DNA, 31 bp, Artificial Sequence
  Description of Artificial Sequence:  Nucleic Acid
  misc_feature: DNAzyme
ggtgtccaggctagctacaacgatccggcgg

SEQ ID NO: 14145 - DNA, 31 bp, Artificial Sequence
  Description of Artificial Sequence:  Nucleic Acid
  misc_feature: DNAzyme
gagaggtgggctagctacaacgaccattccg

SEQ ID NO: 14146 - DNA, 31 bp, Artificial Sequence
  Description of Artificial Sequence:  Nucleic Acid
  misc_feature: DNAzyme
gagagaggggctagctacaacgagtccattc

SEQ ID NO: 14147 - DNA, 31 bp, Artificial Sequence
  Description of Artificial Sequence:  Nucleic Acid
  misc_feature: DNAzyme
gaggaggaggctagctacaacgagagagaga

SEQ ID NO: 14148 - DNA, 31 bp, Artificial Sequence
  Description of Artificial Sequence:  Nucleic Acid
  misc_feature: DNAzyme
gcttcgagggctagctacaacgaggaggagg

SEQ ID NO: 14149 - DNA, 31 bp, Artificial Sequence
  Description of Artificial Sequence:  Nucleic Acid
  misc_feature: DNAzyme
ttgacccgggctagctacaacgattcgagcg

SEQ ID NO: 14150 - DNA, 31 bp, Artificial Sequence
  Description of Artificial Sequence:  Nucleic Acid
  misc_feature: DNAzyme
tcttttgaggctagctacaacgaccgcttcg

SEQ ID NO: 14151 - DNA, 31 bp, Artificial Sequence
  Description of Artificial Sequence:  Nucleic Acid
  misc_feature: DNAzyme
accctggaggctagctacaacgatcttttga

SEQ ID NO: 14152 - DNA, 31 bp, Artificial Sequence
  Description of Artificial Sequence:  Nucleic Acid
  misc_feature: DNAzyme
ggtagttaggctagctacaacgacctggact

SEQ ID NO: 14153 - DNA, 31 bp, Artificial Sequence
  Description of Artificial Sequence:  Nucleic Acid
  misc_feature: DNAzyme
taaggtagggctagctacaacgataccctgg

SEQ ID NO: 14154 - DNA, 31 bp, Artificial Sequence
  Description of Artificial Sequence:  Nucleic Acid
  misc_feature: DNAzyme
gaataaggggctagctacaacgaagttaccc

SEQ ID NO: 14155 - DNA, 31 bp, Artificial Sequence
  Description of Artificial Sequence:  Nucleic Acid
  misc_feature: DNAzyme
tcagagaaggctagctacaacgaaaggtagt

SEQ ID NO: 14156 - DNA, 31 bp, Artificial Sequence
  Description of Artificial Sequence:  Nucleic Acid
  misc_feature: DNAzyme
gcgtggagggctagctacaacgacagagaat

SEQ ID NO: 14157 - DNA, 31 bp, Artificial Sequence
  Description of Artificial Sequence:  Nucleic Acid
  misc_feature: DNAzyme
cactcgcgggctagctacaacgaggagtcag

SEQ ID NO: 14158 - DNA, 31 bp, Artificial Sequence
  Description of Artificial Sequence:  Nucleic Acid
  misc_feature: DNAzyme
atcactcgggctagctacaacgagtggagtc

SEQ ID NO: 14159 - DNA, 31 bp, Artificial Sequence
  Description of Artificial Sequence:  Nucleic Acid
  misc_feature: DNAzyme
taacatcaggctagctacaacgatcgcgtgg

SEQ ID NO: 14160 - DNA, 31 bp, Artificial Sequence
  Description of Artificial Sequence:  Nucleic Acid
  misc_feature: DNAzyme
cggtaacaggctagctacaacgacactcgcg

SEQ ID NO: 14161 - DNA, 31 bp, Artificial Sequence
  Description of Artificial Sequence:  Nucleic Acid
  misc_feature: DNAzyme
ggcggtaaggctagctacaacgaatcactcg

SEQ ID NO: 14162 - DNA, 31 bp, Artificial Sequence
  Description of Artificial Sequence:  Nucleic Acid
  misc_feature: DNAzyme
atgggcggggctagctacaacgaaacatcac

SEQ ID NO: 14163 - DNA, 31 bp, Artificial Sequence
  Description of Artificial Sequence:  Nucleic Acid
  misc_feature: DNAzyme
gagatgggggctagctacaacgaggtaacat

SEQ ID NO: 14164 - DNA, 31 bp, Artificial Sequence
  Description of Artificial Sequence:  Nucleic Acid
  misc_feature: DNAzyme
gcaggagaggctagctacaacgagggcggta

SEQ ID NO: 14165 - DNA, 31 bp, Artificial Sequence
  Description of Artificial Sequence:  Nucleic Acid
  misc_feature: DNAzyme
tgtggcggggctagctacaacgaaggagatg

SEQ ID NO: 14166 - DNA, 31 bp, Artificial Sequence
  Description of Artificial Sequence:  Nucleic Acid
  misc_feature: DNAzyme
tcctgtggggctagctacaacgaggcaggag

SEQ ID NO: 14167 - DNA, 31 bp, Artificial Sequence
  Description of Artificial Sequence:  Nucleic Acid
  misc_feature: DNAzyme
acctcctgggctagctacaacgaggcggcag

SEQ ID NO: 14168 - DNA, 31 bp, Artificial Sequence
  Description of Artificial Sequence:  Nucleic Acid
  misc_feature: DNAzyme
gaggccaaggctagctacaacgactcctgtg

SEQ ID NO: 14169 - DNA, 31 bp, Artificial Sequence
  Description of Artificial Sequence:  Nucleic Acid
  misc_feature: DNAzyme
catcgaggggctagctacaacgacaacctcc

SEQ ID NO: 14170 - DNA, 31 bp, Artificial Sequence
  Description of Artificial Sequence:  Nucleic Acid
  misc_feature: DNAzyme
tgacctcaggctagctacaacgacgaggcca

SEQ ID NO: 14171 - DNA, 31 bp, Artificial Sequence
  Description of Artificial Sequence:  Nucleic Acid
  misc_feature: DNAzyme
gactttgaggctagctacaacgactcatcga

SEQ ID NO: 14172 - DNA, 31 bp, Artificial Sequence
  Description of Artificial Sequence:  Nucleic Acid
  misc_feature: DNAzyme
tccccagaggctagctacaacgatttgacct

SEQ ID NO: 14173 - DNA, 31 bp, Artificial Sequence
  Description of Artificial Sequence:  Nucleic Acid
  misc_feature: DNAzyme
caatatgaggctagctacaacgatccccaga

SEQ ID NO: 14174 - DNA, 31 bp, Artificial Sequence
  Description of Artificial Sequence:  Nucleic Acid
  misc_feature: DNAzyme
acccaataggctagctacaacgagactcccc

SEQ ID NO: 14175 - DNA, 31 bp, Artificial Sequence
  Description of Artificial Sequence:  Nucleic Acid
  misc_feature: DNAzyme
ttacccaaggctagctacaacgaatgactcc

SEQ ID NO: 14176 - DNA, 31 bp, Artificial Sequence
  Description of Artificial Sequence:  Nucleic Acid
  misc_feature: DNAzyme
atacattaggctagctacaacgaccaatatg

SEQ ID NO: 14177 - DNA, 31 bp, Artificial Sequence
  Description of Artificial Sequence:  Nucleic Acid
  misc_feature: DNAzyme
gacatacaggctagctacaacgatacccaat

SEQ ID NO: 14178 - DNA, 31 bp, Artificial Sequence
  Description of Artificial Sequence:  Nucleic Acid
  misc_feature: DNAzyme
gcgacataggctagctacaacgaattaccca

SEQ ID NO: 14179 - DNA, 31 bp, Artificial Sequence
  Description of Artificial Sequence:  Nucleic Acid
  misc_feature: DNAzyme
aggcgacaggctagctacaacgaacattacc

SEQ ID NO: 14180 - DNA, 31 bp, Artificial Sequence
  Description of Artificial Sequence:  Nucleic Acid
  misc_feature: DNAzyme
gaaggcgaggctagctacaacgaatacatta

SEQ ID NO: 14181 - DNA, 31 bp, Artificial Sequence
  Description of Artificial Sequence:  Nucleic Acid
  misc_feature: DNAzyme
ttcgaaggggctagctacaacgagacataca

SEQ ID NO: 14182 - DNA, 31 bp, Artificial Sequence
  Description of Artificial Sequence:  Nucleic Acid
  misc_feature: DNAzyme
tgtctgcgggctagctacaacgacttcttcg

SEQ ID NO: 14183 - DNA, 31 bp, Artificial Sequence
  Description of Artificial Sequence:  Nucleic Acid
  misc_feature: DNAzyme
gctgtctgggctagctacaacgagccttctt

SEQ ID NO: 14184 - DNA, 31 bp, Artificial Sequence
  Description of Artificial Sequence:  Nucleic Acid
  misc_feature: DNAzyme
gccagctgggctagctacaacgactgcgcct

SEQ ID NO: 14185 - DNA, 31 bp, Artificial Sequence
  Description of Artificial Sequence:  Nucleic Acid
  misc_feature: DNAzyme
ctagccagggctagctacaacgatgtctgcg

SEQ ID NO: 14186 - DNA, 31 bp, Artificial Sequence
  Description of Artificial Sequence:  Nucleic Acid
  misc_feature: DNAzyme
tcagctagggctagctacaacgacagctgtc

SEQ ID NO: 14187 - DNA, 31 bp, Artificial Sequence
  Description of Artificial Sequence:  Nucleic Acid
  misc_feature: DNAzyme
ctcctcagggctagctacaacgatagccagc

SEQ ID NO: 14188 - DNA, 31 bp, Artificial Sequence
  Description of Artificial Sequence:  Nucleic Acid
  misc_feature: DNAzyme
ttggccagggctagctacaacgatcctcagc

SEQ ID NO: 14189 - DNA, 31 bp, Artificial Sequence
  Description of Artificial Sequence:  Nucleic Acid
  misc_feature: DNAzyme
ctccttggggctagctacaacgacagctcct

SEQ ID NO: 14190 - DNA, 31 bp, Artificial Sequence
  Description of Artificial Sequence:  Nucleic Acid
  misc_feature: DNAzyme
ccagggggggctagctacaacgactcccccc

SEQ ID NO: 14191 - DNA, 31 bp, Artificial Sequence
  Description of Artificial Sequence:  Nucleic Acid
  misc_feature: DNAzyme
taggctggggctagctacaacgacagggggt

SEQ ID NO: 14192 - DNA, 31 bp, Artificial Sequence
  Description of Artificial Sequence:  Nucleic Acid
  misc_feature: DNAzyme
agcgtaggggctagctacaacgatggccagg

SEQ ID NO: 14193 - DNA, 31 bp, Artificial Sequence
  Description of Artificial Sequence:  Nucleic Acid
  misc_feature: DNAzyme
gctaagcgggctagctacaacgaaggctggc

SEQ ID NO: 14194 - DNA, 31 bp, Artificial Sequence
  Description of Artificial Sequence:  Nucleic Acid
  misc_feature: DNAzyme
cggctaagggctagctacaacgagtaggctg

SEQ ID NO: 14195 - DNA, 31 bp, Artificial Sequence
  Description of Artificial Sequence:  Nucleic Acid
  misc_feature: DNAzyme
agagacggggctagctacaacgataagcgta

SEQ ID NO: 14196 - DNA, 31 bp, Artificial Sequence
  Description of Artificial Sequence:  Nucleic Acid
  misc_feature: DNAzyme
aggagagaggctagctacaacgaggctaagc

SEQ ID NO: 14197 - DNA, 31 bp, Artificial Sequence
  Description of Artificial Sequence:  Nucleic Acid
  misc_feature: DNAzyme
ccacattaggctagctacaacgaaggagaga

SEQ ID NO: 14198 - DNA, 31 bp, Artificial Sequence
  Description of Artificial Sequence:  Nucleic Acid
  misc_feature: DNAzyme
ctcccacaggctagctacaacgatacaggag

SEQ ID NO: 14199 - DNA, 31 bp, Artificial Sequence
  Description of Artificial Sequence:  Nucleic Acid
  misc_feature: DNAzyme
ccctcccaggctagctacaacgaattacagg

SEQ ID NO: 14200 - DNA, 31 bp, Artificial Sequence
  Description of Artificial Sequence:  Nucleic Acid
  misc_feature: DNAzyme
ctcaccgaggctagctacaacgaccctccca

SEQ ID NO: 14201 - DNA, 31 bp, Artificial Sequence
  Description of Artificial Sequence:  Nucleic Acid
  misc_feature: DNAzyme
catgctcaggctagctacaacgacgacccct

SEQ ID NO: 14202 - DNA, 31 bp, Artificial Sequence
  Description of Artificial Sequence:  Nucleic Acid
  misc_feature: DNAzyme
cgtccatgggctagctacaacgatcaccgac

SEQ ID NO: 14203 - DNA, 31 bp, Artificial Sequence
  Description of Artificial Sequence:  Nucleic Acid
  misc_feature: DNAzyme
cacgtccaggctagctacaacgagctcaccg

SEQ ID NO: 14204 - DNA, 31 bp, Artificial Sequence
  Description of Artificial Sequence:  Nucleic Acid
  misc_feature: DNAzyme
tgctcacgggctagctacaacgaccatgctc

SEQ ID NO: 14205 - DNA, 31 bp, Artificial Sequence
  Description of Artificial Sequence:  Nucleic Acid
  misc_feature: DNAzyme
agtgctcaggctagctacaacgagtccatgc

SEQ ID NO: 14206 - DNA, 31 bp, Artificial Sequence
  Description of Artificial Sequence:  Nucleic Acid
  misc_feature: DNAzyme
tagcagtgggctagctacaacgatcacgtcc

SEQ ID NO: 14207 - DNA, 31 bp, Artificial Sequence
  Description of Artificial Sequence:  Nucleic Acid
  misc_feature: DNAzyme
tgtagcagggctagctacaacgagctcacgt

SEQ ID NO: 14208 - DNA, 31 bp, Artificial Sequence
  Description of Artificial Sequence:  Nucleic Acid
  misc_feature: DNAzyme
ggatgtagggctagctacaacgaagtgctca

SEQ ID NO: 14209 - DNA, 31 bp, Artificial Sequence
  Description of Artificial Sequence:  Nucleic Acid
  misc_feature: DNAzyme
accggatgggctagctacaacgaagcagtgc

SEQ ID NO: 14210 - DNA, 31 bp, Artificial Sequence
  Description of Artificial Sequence:  Nucleic Acid
  misc_feature: DNAzyme
gaaccggaggctagctacaacgagtagcagt

SEQ ID NO: 14211 - DNA, 31 bp, Artificial Sequence
  Description of Artificial Sequence:  Nucleic Acid
  misc_feature: DNAzyme
agcccgaaggctagctacaacgacggatgta

SEQ ID NO: 14212 - DNA, 31 bp, Artificial Sequence
  Description of Artificial Sequence:  Nucleic Acid
  misc_feature: DNAzyme
catgcgagggctagctacaacgaccgaaccg

SEQ ID NO: 14213 - DNA, 31 bp, Artificial Sequence
  Description of Artificial Sequence:  Nucleic Acid
  misc_feature: DNAzyme
ctcccatgggctagctacaacgagagcccga

SEQ ID NO: 14214 - DNA, 31 bp, Artificial Sequence
  Description of Artificial Sequence:  Nucleic Acid
  misc_feature: DNAzyme
agctcccaggctagctacaacgagcgagccc

SEQ ID NO: 14215 - DNA, 31 bp, Artificial Sequence
  Description of Artificial Sequence:  Nucleic Acid
  misc_feature: DNAzyme
ggtcacagggctagctacaacgatcccatgc

SEQ ID NO: 14216 - DNA, 31 bp, Artificial Sequence
  Description of Artificial Sequence:  Nucleic Acid
  misc_feature: DNAzyme
ttgggtcaggctagctacaacgaagctccca

SEQ ID NO: 14217 - DNA, 31 bp, Artificial Sequence
  Description of Artificial Sequence:  Nucleic Acid
  misc_feature: DNAzyme
tggttgggggctagctacaacgacacagctc

SEQ ID NO: 14218 - DNA, 31 bp, Artificial Sequence
  Description of Artificial Sequence:  Nucleic Acid
  misc_feature: DNAzyme
atacctggggctagctacaacgatgggtcac

SEQ ID NO: 14219 - DNA, 31 bp, Artificial Sequence
  Description of Artificial Sequence:  Nucleic Acid
  misc_feature: DNAzyme
aaccaataggctagctacaacgactggttgg

SEQ ID NO: 14220 - DNA, 31 bp, Artificial Sequence
  Description of Artificial Sequence:  Nucleic Acid
  misc_feature: DNAzyme
tcaaccaaggctagctacaacgaacctggtt

SEQ ID NO: 14221 - DNA, 31 bp, Artificial Sequence
  Description of Artificial Sequence:  Nucleic Acid
  misc_feature: DNAzyme
gggctcaaggctagctacaacgacaatacct

SEQ ID NO: 14222 - DNA, 31 bp, Artificial Sequence
  Description of Artificial Sequence:  Nucleic Acid
  misc_feature: DNAzyme
aggtcgggggctagctacaacgatcaaccaa

SEQ ID NO: 14223 - DNA, 31 bp, Artificial Sequence
  Description of Artificial Sequence:  Nucleic Acid
  misc_feature: DNAzyme
attccaggggctagctacaacgacgggctca

SEQ ID NO: 14224 - DNA, 31 bp, Artificial Sequence
  Description of Artificial Sequence:  Nucleic Acid
  misc_feature: DNAzyme
aggtcacaggctagctacaacgatccaggtc

SEQ ID NO: 14225 - DNA, 31 bp, Artificial Sequence
  Description of Artificial Sequence:  Nucleic Acid
  misc_feature: DNAzyme
ggaggtcaggctagctacaacgaattccagg

SEQ ID NO: 14226 - DNA, 31 bp, Artificial Sequence
  Description of Artificial Sequence:  Nucleic Acid
  misc_feature: DNAzyme
ggaggaggggctagctacaacgacacattcc

SEQ ID NO: 14227 - DNA, 31 bp, Artificial Sequence
  Description of Artificial Sequence:  Nucleic Acid
  misc_feature: DNAzyme
ctctcctaggctagctacaacgagggaggag

SEQ ID NO: 14228 - DNA, 31 bp, Artificial Sequence
  Description of Artificial Sequence:  Nucleic Acid
  misc_feature: DNAzyme
cgtgtggaggctagctacaacgactctccta

SEQ ID NO: 14229 - DNA, 31 bp, Artificial Sequence
  Description of Artificial Sequence:  Nucleic Acid
  misc_feature: DNAzyme
ccggcgtgggctagctacaacgaggacctct

SEQ ID NO: 14230 - DNA, 31 bp, Artificial Sequence
  Description of Artificial Sequence:  Nucleic Acid
  misc_feature: DNAzyme
ctccggcgggctagctacaacgagtggacct

SEQ ID NO: 14231 - DNA, 31 bp, Artificial Sequence
  Description of Artificial Sequence:  Nucleic Acid
  misc_feature: DNAzyme
cgctccggggctagctacaacgagtgtggac

SEQ ID NO: 14232 - DNA, 31 bp, Artificial Sequence
  Description of Artificial Sequence:  Nucleic Acid
  misc_feature: DNAzyme
cagaaacgggctagctacaacgatccggcgt

SEQ ID NO: 14233 - DNA, 31 bp, Artificial Sequence
  Description of Artificial Sequence:  Nucleic Acid
  misc_feature: DNAzyme
cacagaaaggctagctacaacgagctccggc

SEQ ID NO: 14234 - DNA, 31 bp, Artificial Sequence
  Description of Artificial Sequence:  Nucleic Acid
  misc_feature: DNAzyme
cgcctgcaggctagctacaacgaagaaacgc

SEQ ID NO: 14235 - DNA, 31 bp, Artificial Sequence
  Description of Artificial Sequence:  Nucleic Acid
  misc_feature: DNAzyme
tacgcctgggctagctacaacgaacagaaac

SEQ ID NO: 14236 - DNA, 31 bp, Artificial Sequence
  Description of Artificial Sequence:  Nucleic Acid
  misc_feature: DNAzyme
ggggtacgggctagctacaacgactgcacag

SEQ ID NO: 14237 - DNA, 31 bp, Artificial Sequence
  Description of Artificial Sequence:  Nucleic Acid
  misc_feature: DNAzyme
atggggtaggctagctacaacgagcctgcac

SEQ ID NO: 14238 - DNA, 31 bp, Artificial Sequence
  Description of Artificial Sequence:  Nucleic Acid
  misc_feature: DNAzyme
ggatggggggctagctacaacgaacgcctgc

SEQ ID NO: 14239 - DNA, 31 bp, Artificial Sequence
  Description of Artificial Sequence:  Nucleic Acid
  misc_feature: DNAzyme
gaagtggaggctagctacaacgaggggtacg

SEQ ID NO: 14240 - DNA, 31 bp, Artificial Sequence
  Description of Artificial Sequence:  Nucleic Acid
  misc_feature: DNAzyme
cacggaagggctagctacaacgaggatgggg

SEQ ID NO: 14241 - DNA, 31 bp, Artificial Sequence
  Description of Artificial Sequence:  Nucleic Acid
  misc_feature: DNAzyme
attcttcaggctagctacaacgaggaagtgg

SEQ ID NO: 14242 - DNA, 31 bp, Artificial Sequence
  Description of Artificial Sequence:  Nucleic Acid
  misc_feature: DNAzyme
cccccgaaggctagctacaacgatcttcacg

SEQ ID NO: 14243 - DNA, 31 bp, Artificial Sequence
  Description of Artificial Sequence:  Nucleic Acid
  misc_feature: DNAzyme
aggttccgggctagctacaacgacccccgaa

SEQ ID NO: 14244 - DNA, 31 bp, Artificial Sequence
  Description of Artificial Sequence:  Nucleic Acid
  misc_feature: DNAzyme
gtgccaggggctagctacaacgatccgcccc

SEQ ID NO: 14245 - DNA, 31 bp, Artificial Sequence
  Description of Artificial Sequence:  Nucleic Acid
  misc_feature: DNAzyme
tgcccgtgggctagctacaacgacaggttcc

SEQ ID NO: 14246 - DNA, 31 bp, Artificial Sequence
  Description of Artificial Sequence:  Nucleic Acid
  misc_feature: DNAzyme
aatgcccgggctagctacaacgagccaggtt

SEQ ID NO: 14247 - DNA, 31 bp, Artificial Sequence
  Description of Artificial Sequence:  Nucleic Acid
  misc_feature: DNAzyme
gtaaaatgggctagctacaacgaccgtgcca

SEQ ID NO: 14248 - DNA, 31 bp, Artificial Sequence
  Description of Artificial Sequence:  Nucleic Acid
  misc_feature: DNAzyme
acgtaaaaggctagctacaacgagcccgtgc

SEQ ID NO: 14249 - DNA, 31 bp, Artificial Sequence
  Description of Artificial Sequence:  Nucleic Acid
  misc_feature: DNAzyme
tgacaacgggctagctacaacgaaaaatgcc

SEQ ID NO: 14250 - DNA, 31 bp, Artificial Sequence
  Description of Artificial Sequence:  Nucleic Acid
  misc_feature: DNAzyme
actgacaaggctagctacaacgagtaaaatg

SEQ ID NO: 14251 - DNA, 31 bp, Artificial Sequence
  Description of Artificial Sequence:  Nucleic Acid
  misc_feature: DNAzyme
accactgaggctagctacaacgaaacgtaaa

SEQ ID NO: 14252 - DNA, 31 bp, Artificial Sequence
  Description of Artificial Sequence:  Nucleic Acid
  misc_feature: DNAzyme
catgaccaggctagctacaacgatgacaacg

SEQ ID NO: 14253 - DNA, 31 bp, Artificial Sequence
  Description of Artificial Sequence:  Nucleic Acid
  misc_feature: DNAzyme
gggcatgaggctagctacaacgacactgaca

SEQ ID NO: 14254 - DNA, 31 bp, Artificial Sequence
  Description of Artificial Sequence:  Nucleic Acid
  misc_feature: DNAzyme
gacgggcaggctagctacaacgagaccactg

SEQ ID NO: 14255 - DNA, 31 bp, Artificial Sequence
  Description of Artificial Sequence:  Nucleic Acid
  misc_feature: DNAzyme
gtgacgggggctagctacaacgaatgaccac

SEQ ID NO: 14256 - DNA, 31 bp, Artificial Sequence
  Description of Artificial Sequence:  Nucleic Acid
  misc_feature: DNAzyme
ctacgtgaggctagctacaacgagggcatga

SEQ ID NO: 14257 - DNA, 31 bp, Artificial Sequence
  Description of Artificial Sequence:  Nucleic Acid
  misc_feature: DNAzyme
ccactacgggctagctacaacgagacgggca

SEQ ID NO: 14258 - DNA, 31 bp, Artificial Sequence
  Description of Artificial Sequence:  Nucleic Acid
  misc_feature: DNAzyme
ttccactaggctagctacaacgagtgacggg

SEQ ID NO: 14259 - DNA, 31 bp, Artificial Sequence
  Description of Artificial Sequence:  Nucleic Acid
  misc_feature: DNAzyme
gatttccaggctagctacaacgatacgtgac

SEQ ID NO: 14260 - DNA, 31 bp, Artificial Sequence
  Description of Artificial Sequence:  Nucleic Acid
  misc_feature: DNAzyme
gtgggggaggctagctacaacgattccacta

SEQ ID NO: 14261 - DNA, 31 bp, Artificial Sequence
  Description of Artificial Sequence:  Nucleic Acid
  misc_feature: DNAzyme
tacgcgggggctagctacaacgagggggatt

SEQ ID NO: 14262 - DNA, 31 bp, Artificial Sequence
  Description of Artificial Sequence:  Nucleic Acid
  misc_feature: DNAzyme
aggttacgggctagctacaacgagggtgggg

SEQ ID NO: 14263 - DNA, 31 bp, Artificial Sequence
  Description of Artificial Sequence:  Nucleic Acid
  misc_feature: DNAzyme
ggaggttaggctagctacaacgagcgggtgg

SEQ ID NO: 14264 - DNA, 31 bp, Artificial Sequence
  Description of Artificial Sequence:  Nucleic Acid
  misc_feature: DNAzyme
cgtggaggggctagctacaacgatacgcggg

SEQ ID NO: 14265 - DNA, 31 bp, Artificial Sequence
  Description of Artificial Sequence:  Nucleic Acid
  misc_feature: DNAzyme
ggagtacgggctagctacaacgaggaggtta

SEQ ID NO: 14266 - DNA, 31 bp, Artificial Sequence
  Description of Artificial Sequence:  Nucleic Acid
  misc_feature: DNAzyme
gaggagtaggctagctacaacgagtggaggt

SEQ ID NO: 14267 - DNA, 31 bp, Artificial Sequence
  Description of Artificial Sequence:  Nucleic Acid
  misc_feature: DNAzyme
ctgaggagggctagctacaacgaacgtggag

SEQ ID NO: 14268 - DNA, 31 bp, Artificial Sequence
  Description of Artificial Sequence:  Nucleic Acid
  misc_feature: DNAzyme
ggtggccgggctagctacaacgatgaggagt

SEQ ID NO: 14269 - DNA, 31 bp, Artificial Sequence
  Description of Artificial Sequence:  Nucleic Acid
  misc_feature: DNAzyme
gcgggtggggctagctacaacgacgctgagg

SEQ ID NO: 14270 - DNA, 31 bp, Artificial Sequence
  Description of Artificial Sequence:  Nucleic Acid
  misc_feature: DNAzyme
atggcgggggctagctacaacgaggccgctg

SEQ ID NO: 14271 - DNA, 31 bp, Artificial Sequence
  Description of Artificial Sequence:  Nucleic Acid
  misc_feature: DNAzyme
cgctatggggctagctacaacgagggtggcc

SEQ ID NO: 14272 - DNA, 31 bp, Artificial Sequence
  Description of Artificial Sequence:  Nucleic Acid
  misc_feature: DNAzyme
gggcgctaggctagctacaacgaggcgggtg

SEQ ID NO: 14273 - DNA, 31 bp, Artificial Sequence
  Description of Artificial Sequence:  Nucleic Acid
  misc_feature: DNAzyme
ctagggcgggctagctacaacgatatggcgg

SEQ ID NO: 14274 - DNA, 31 bp, Artificial Sequence
  Description of Artificial Sequence:  Nucleic Acid
  misc_feature: DNAzyme
ttctagggggctagctacaacgagctatggc

SEQ ID NO: 14275 - DNA, 31 bp, Artificial Sequence
  Description of Artificial Sequence:  Nucleic Acid
  misc_feature: DNAzyme
ccaaactaggctagctacaacgatctagggc

SEQ ID NO: 14276 - DNA, 31 bp, Artificial Sequence
  Description of Artificial Sequence:  Nucleic Acid
  misc_feature: DNAzyme
gcgccaaaggctagctacaacgatattctag

SEQ ID NO: 14277 - DNA, 31 bp, Artificial Sequence
  Description of Artificial Sequence:  Nucleic Acid
  misc_feature: DNAzyme
ccccggcgggctagctacaacgacaaactat

SEQ ID NO: 14278 - DNA, 31 bp, Artificial Sequence
  Description of Artificial Sequence:  Nucleic Acid
  misc_feature: DNAzyme
ctccccggggctagctacaacgagccaaact

SEQ ID NO: 14279 - DNA, 31 bp, Artificial Sequence
  Description of Artificial Sequence:  Nucleic Acid
  misc_feature: DNAzyme
cctgcacaggctagctacaacgacctccccg

SEQ ID NO: 14280 - DNA, 31 bp, Artificial Sequence
  Description of Artificial Sequence:  Nucleic Acid
  misc_feature: DNAzyme
cccctgcaggctagctacaacgaaccctccc

SEQ ID NO: 14281 - DNA, 31 bp, Artificial Sequence
  Description of Artificial Sequence:  Nucleic Acid
  misc_feature: DNAzyme
ggcccctgggctagctacaacgaacaccctc

SEQ ID NO: 14282 - DNA, 31 bp, Artificial Sequence
  Description of Artificial Sequence:  Nucleic Acid
  misc_feature: DNAzyme
accacgggggctagctacaacgaccctgcac

SEQ ID NO: 14283 - DNA, 31 bp, Artificial Sequence
  Description of Artificial Sequence:  Nucleic Acid
  misc_feature: DNAzyme
atacaccaggctagctacaacgagggcccct

SEQ ID NO: 14284 - DNA, 31 bp, Artificial Sequence
  Description of Artificial Sequence:  Nucleic Acid
  misc_feature: DNAzyme
cgcatacaggctagctacaacgacacgggcc

SEQ ID NO: 14285 - DNA, 31 bp, Artificial Sequence
  Description of Artificial Sequence:  Nucleic Acid
  misc_feature: DNAzyme
aacgcataggctagctacaacgaaccacggg

SEQ ID NO: 14286 - DNA, 31 bp, Artificial Sequence
  Description of Artificial Sequence:  Nucleic Acid
  misc_feature: DNAzyme
tcaacgcaggctagctacaacgaacaccacg

SEQ ID NO: 14287 - DNA, 31 bp, Artificial Sequence
  Description of Artificial Sequence:  Nucleic Acid
  misc_feature: DNAzyme
catcaacgggctagctacaacgaatacacca

SEQ ID NO: 14288 - DNA, 31 bp, Artificial Sequence
  Description of Artificial Sequence:  Nucleic Acid
  misc_feature: DNAzyme
cccatcaaggctagctacaacgagcatacac

SEQ ID NO: 14289 - DNA, 31 bp, Artificial Sequence
  Description of Artificial Sequence:  Nucleic Acid
  misc_feature: DNAzyme
attccccaggctagctacaacgacaacgcat

SEQ ID NO: 14290 - DNA, 31 bp, Artificial Sequence
  Description of Artificial Sequence:  Nucleic Acid
  misc_feature: DNAzyme
atggaacaggctagctacaacgatccccatc

SEQ ID NO: 14291 - DNA, 31 bp, Artificial Sequence
  Description of Artificial Sequence:  Nucleic Acid
  misc_feature: DNAzyme
gcatggaaggctagctacaacgaattcccca

SEQ ID NO: 14292 - DNA, 31 bp, Artificial Sequence
  Description of Artificial Sequence:  Nucleic Acid
  misc_feature: DNAzyme
acgtggcaggctagctacaacgaggaacatt

SEQ ID NO: 14293 - DNA, 31 bp, Artificial Sequence
  Description of Artificial Sequence:  Nucleic Acid
  misc_feature: DNAzyme
acacgtggggctagctacaacgaatggaaca

SEQ ID NO: 14294 - DNA, 31 bp, Artificial Sequence
  Description of Artificial Sequence:  Nucleic Acid
  misc_feature: DNAzyme
gcaacacgggctagctacaacgaggcatgga

SEQ ID NO: 14295 - DNA, 31 bp, Artificial Sequence
  Description of Artificial Sequence:  Nucleic Acid
  misc_feature: DNAzyme
tagcaacaggctagctacaacgagtggcatg

SEQ ID NO: 14296 - DNA, 31 bp, Artificial Sequence
  Description of Artificial Sequence:  Nucleic Acid
  misc_feature: DNAzyme
tgtagcaaggctagctacaacgaacgtggca

SEQ ID NO: 14297 - DNA, 31 bp, Artificial Sequence
  Description of Artificial Sequence:  Nucleic Acid
  misc_feature: DNAzyme
acctgtagggctagctacaacgaaacacgtg

SEQ ID NO: 14298 - DNA, 31 bp, Artificial Sequence
  Description of Artificial Sequence:  Nucleic Acid
  misc_feature: DNAzyme
aagacctgggctagctacaacgaagcaacac

SEQ ID NO: 14299 - DNA, 31 bp, Artificial Sequence
  Description of Artificial Sequence:  Nucleic Acid
  misc_feature: DNAzyme
gcctaagaggctagctacaacgactgtagca

SEQ ID NO: 14300 - DNA, 31 bp, Artificial Sequence
  Description of Artificial Sequence:  Nucleic Acid
  misc_feature: DNAzyme
tcgtcgggggctagctacaacgactaagacc

SEQ ID NO: 14301 - DNA, 31 bp, Artificial Sequence
  Description of Artificial Sequence:  Nucleic Acid
  misc_feature: DNAzyme
gaggatcgggctagctacaacgacgggccta

SEQ ID NO: 14302 - DNA, 31 bp, Artificial Sequence
  Description of Artificial Sequence:  Nucleic Acid
  misc_feature: DNAzyme
catgaggaggctagctacaacgacgtcgggc

SEQ ID NO: 14303 - DNA, 31 bp, Artificial Sequence
  Description of Artificial Sequence:  Nucleic Acid
  misc_feature: DNAzyme
cggttccaggctagctacaacgagaggatcg

SEQ ID NO: 14304 - DNA, 31 bp, Artificial Sequence
  Description of Artificial Sequence:  Nucleic Acid
  misc_feature: DNAzyme
aagaacggggctagctacaacgatccatgag

SEQ ID NO: 14305 - DNA, 31 bp, Artificial Sequence
  Description of Artificial Sequence:  Nucleic Acid
  misc_feature: DNAzyme
gtcaagaaggctagctacaacgaggttccat

SEQ ID NO: 14306 - DNA, 31 bp, Artificial Sequence
  Description of Artificial Sequence:  Nucleic Acid
  misc_feature: DNAzyme
tggacatgggctagctacaacgacaagaacg

SEQ ID NO: 14307 - DNA, 31 bp, Artificial Sequence
  Description of Artificial Sequence:  Nucleic Acid
  misc_feature: DNAzyme
actggacaggctagctacaacgagtcaagaa

SEQ ID NO: 14308 - DNA, 31 bp, Artificial Sequence
  Description of Artificial Sequence:  Nucleic Acid
  misc_feature: DNAzyme
tcactggaggctagctacaacgaatgtcaag

SEQ ID NO: 14309 - DNA, 31 bp, Artificial Sequence
  Description of Artificial Sequence:  Nucleic Acid
  misc_feature: DNAzyme
gcagatcaggctagctacaacgatggacatg

SEQ ID NO: 14310 - DNA, 31 bp, Artificial Sequence
  Description of Artificial Sequence:  Nucleic Acid
  misc_feature: DNAzyme
agcgcagaggctagctacaacgacactggac

SEQ ID NO: 14311 - DNA, 31 bp, Artificial Sequence
  Description of Artificial Sequence:  Nucleic Acid
  misc_feature: DNAzyme
gcggagcgggctagctacaacgaagatcact

SEQ ID NO: 14312 - DNA, 31 bp, Artificial Sequence
  Description of Artificial Sequence:  Nucleic Acid
  misc_feature: DNAzyme
atgcggagggctagctacaacgagcagatca

SEQ ID NO: 14313 - DNA, 31 bp, Artificial Sequence
  Description of Artificial Sequence:  Nucleic Acid
  misc_feature: DNAzyme
tgcccatgggctagctacaacgaggagcgca

SEQ ID NO: 14314 - DNA, 31 bp, Artificial Sequence
  Description of Artificial Sequence:  Nucleic Acid
  misc_feature: DNAzyme
cctgcccaggctagctacaacgagcggagcg

SEQ ID NO: 14315 - DNA, 31 bp, Artificial Sequence
  Description of Artificial Sequence:  Nucleic Acid
  misc_feature: DNAzyme
accacctgggctagctacaacgaccatgcgg

SEQ ID NO: 14316 - DNA, 31 bp, Artificial Sequence
  Description of Artificial Sequence:  Nucleic Acid
  misc_feature: DNAzyme
gcaaaccaggctagctacaacgactgcccat

SEQ ID NO: 14317 - DNA, 31 bp, Artificial Sequence
  Description of Artificial Sequence:  Nucleic Acid
  misc_feature: DNAzyme
catgcaaaggctagctacaacgacacctgcc

SEQ ID NO: 14318 - DNA, 31 bp, Artificial Sequence
  Description of Artificial Sequence:  Nucleic Acid
  misc_feature: DNAzyme
gtatcatgggctagctacaacgaaaaccacc

SEQ ID NO: 14319 - DNA, 31 bp, Artificial Sequence
  Description of Artificial Sequence:  Nucleic Acid
  misc_feature: DNAzyme
cggtatcaggctagctacaacgagcaaacca

SEQ ID NO: 14320 - DNA, 31 bp, Artificial Sequence
  Description of Artificial Sequence:  Nucleic Acid
  misc_feature: DNAzyme
agacggtaggctagctacaacgacatgcaaa

SEQ ID NO: 14321 - DNA, 31 bp, Artificial Sequence
  Description of Artificial Sequence:  Nucleic Acid
  misc_feature: DNAzyme
ggagacggggctagctacaacgaatcatgca

SEQ ID NO: 14322 - DNA, 31 bp, Artificial Sequence
  Description of Artificial Sequence:  Nucleic Acid
  misc_feature: DNAzyme
cggggagaggctagctacaacgaggtatcat

SEQ ID NO: 14323 - DNA, 31 bp, Artificial Sequence
  Description of Artificial Sequence:  Nucleic Acid
  misc_feature: DNAzyme
gggtctggggctagctacaacgaggggagac

SEQ ID NO: 14324 - DNA, 31 bp, Artificial Sequence
  Description of Artificial Sequence:  Nucleic Acid
  misc_feature: DNAzyme
caggggggggctagctacaacgactggcggg

SEQ ID NO: 14325 - DNA, 31 bp, Artificial Sequence
  Description of Artificial Sequence:  Nucleic Acid
  misc_feature: DNAzyme
cgtgggtaggctagctacaacgaaggggggt

SEQ ID NO: 14326 - DNA, 31 bp, Artificial Sequence
  Description of Artificial Sequence:  Nucleic Acid
  misc_feature: DNAzyme
aacgtgggggctagctacaacgaacaggggg

SEQ ID NO: 14327 - DNA, 31 bp, Artificial Sequence
  Description of Artificial Sequence:  Nucleic Acid
  misc_feature: DNAzyme
tgccaacgggctagctacaacgagggtacag

SEQ ID NO: 14328 - DNA, 31 bp, Artificial Sequence
  Description of Artificial Sequence:  Nucleic Acid
  misc_feature: DNAzyme
catgccaaggctagctacaacgagtgggtac

SEQ ID NO: 14329 - DNA, 31 bp, Artificial Sequence
  Description of Artificial Sequence:  Nucleic Acid
  misc_feature: DNAzyme
ttctcatgggctagctacaacgacaacgtgg

SEQ ID NO: 14330 - DNA, 31 bp, Artificial Sequence
  Description of Artificial Sequence:  Nucleic Acid
  misc_feature: DNAzyme
tcttctcaggctagctacaacgagccaacgt

SEQ ID NO: 14331 - DNA, 31 bp, Artificial Sequence
  Description of Artificial Sequence:  Nucleic Acid
  misc_feature: DNAzyme
gccgggagggctagctacaacgaccctttct

SEQ ID NO: 14332 - DNA, 31 bp, Artificial Sequence
  Description of Artificial Sequence:  Nucleic Acid
  misc_feature: DNAzyme
cgcggttgggctagctacaacgacgggagtc

SEQ ID NO: 14333 - DNA, 31 bp, Artificial Sequence
  Description of Artificial Sequence:  Nucleic Acid
  misc_feature: DNAzyme
tgccgcggggctagctacaacgatgccggga

SEQ ID NO: 14334 - DNA, 31 bp, Artificial Sequence
  Description of Artificial Sequence:  Nucleic Acid
  misc_feature: DNAzyme
tcctgccgggctagctacaacgaggttgccg

SEQ ID NO: 14335 - DNA, 31 bp, Artificial Sequence
  Description of Artificial Sequence:  Nucleic Acid
  misc_feature: DNAzyme
agctcctgggctagctacaacgacgcggttg

SEQ ID NO: 14336 - DNA, 31 bp, Artificial Sequence
  Description of Artificial Sequence:  Nucleic Acid
  misc_feature: DNAzyme
agtccaagggctagctacaacgatcctgccg

SEQ ID NO: 14337 - DNA, 31 bp, Artificial Sequence
  Description of Artificial Sequence:  Nucleic Acid
  misc_feature: DNAzyme
ggcttcagggctagctacaacgaccaagctc

SEQ ID NO: 14338 - DNA, 31 bp, Artificial Sequence
  Description of Artificial Sequence:  Nucleic Acid
  misc_feature: DNAzyme
agacctggggctagctacaacgattcagtcc

SEQ ID NO: 14339 - DNA, 31 bp, Artificial Sequence
  Description of Artificial Sequence:  Nucleic Acid
  misc_feature: DNAzyme
cttcaagaggctagctacaacgactggcttc

SEQ ID NO: 14340 - DNA, 31 bp, Artificial Sequence
  Description of Artificial Sequence:  Nucleic Acid
  misc_feature: DNAzyme
ttgactgaggctagctacaacgattcaagac

SEQ ID NO: 14341 - DNA, 31 bp, Artificial Sequence
  Description of Artificial Sequence:  Nucleic Acid
  misc_feature: DNAzyme
ggtgttgaggctagctacaacgatgacttca

SEQ ID NO: 14342 - DNA, 31 bp, Artificial Sequence
  Description of Artificial Sequence:  Nucleic Acid
  misc_feature: DNAzyme
gcacggtgggctagctacaacgatgactgac

SEQ ID NO: 14343 - DNA, 31 bp, Artificial Sequence
  Description of Artificial Sequence:  Nucleic Acid
  misc_feature: DNAzyme
atgcacggggctagctacaacgagttgactg

SEQ ID NO: 14344 - DNA, 31 bp, Artificial Sequence
  Description of Artificial Sequence:  Nucleic Acid
  misc_feature: DNAzyme
gatatgcaggctagctacaacgaggtgttga

SEQ ID NO: 14345 - DNA, 31 bp, Artificial Sequence
  Description of Artificial Sequence:  Nucleic Acid
  misc_feature: DNAzyme
tggatatgggctagctacaacgaacggtgtt

SEQ ID NO: 14346 - DNA, 31 bp, Artificial Sequence
  Description of Artificial Sequence:  Nucleic Acid
  misc_feature: DNAzyme
actggataggctagctacaacgagcacggtg

SEQ ID NO: 14347 - DNA, 31 bp, Artificial Sequence
  Description of Artificial Sequence:  Nucleic Acid
  misc_feature: DNAzyme
ggactggaggctagctacaacgaatgcacgg

SEQ ID NO: 14348 - DNA, 31 bp, Artificial Sequence
  Description of Artificial Sequence:  Nucleic Acid
  misc_feature: DNAzyme
gtttgggaggctagctacaacgatggatatg

SEQ ID NO: 14349 - DNA, 31 bp, Artificial Sequence
  Description of Artificial Sequence:  Nucleic Acid
  misc_feature: DNAzyme
aagggatgggctagctacaacgattgggact

SEQ ID NO: 14350 - DNA, 31 bp, Artificial Sequence
  Description of Artificial Sequence:  Nucleic Acid
  misc_feature: DNAzyme
ctaagggaggctagctacaacgagtttggga

SEQ ID NO: 14351 - DNA, 31 bp, Artificial Sequence
  Description of Artificial Sequence:  Nucleic Acid
  misc_feature: DNAzyme
gctcgtggggctagctacaacgataagggat

SEQ ID NO: 14352 - DNA, 31 bp, Artificial Sequence
  Description of Artificial Sequence:  Nucleic Acid
  misc_feature: DNAzyme
ccggctcgggctagctacaacgaggctaagg

SEQ ID NO: 14353 - DNA, 31 bp, Artificial Sequence
  Description of Artificial Sequence:  Nucleic Acid
  misc_feature: DNAzyme
tgttccggggctagctacaacgatcgtggct

SEQ ID NO: 14354 - DNA, 31 bp, Artificial Sequence
  Description of Artificial Sequence:  Nucleic Acid
  misc_feature: DNAzyme
acgccatgggctagctacaacgatccggctc

SEQ ID NO: 14355 - DNA, 31 bp, Artificial Sequence
  Description of Artificial Sequence:  Nucleic Acid
  misc_feature: DNAzyme
ccacgccaggctagctacaacgagttccggc

SEQ ID NO: 14356 - DNA, 31 bp, Artificial Sequence
  Description of Artificial Sequence:  Nucleic Acid
  misc_feature: DNAzyme
gctccacgggctagctacaacgacatgttcc

SEQ ID NO: 14357 - DNA, 31 bp, Artificial Sequence
  Description of Artificial Sequence:  Nucleic Acid
  misc_feature: DNAzyme
ctgctccaggctagctacaacgagccatgtt

SEQ ID NO: 14358 - DNA, 31 bp, Artificial Sequence
  Description of Artificial Sequence:  Nucleic Acid
  misc_feature: DNAzyme
gaggactgggctagctacaacgatccacgcc

SEQ ID NO: 14359 - DNA, 31 bp, Artificial Sequence
  Description of Artificial Sequence:  Nucleic Acid
  misc_feature: DNAzyme
aatgaggaggctagctacaacgatgctccac

SEQ ID NO: 14360 - DNA, 31 bp, Artificial Sequence
  Description of Artificial Sequence:  Nucleic Acid
  misc_feature: DNAzyme
tggatcaaggctagctacaacgagaggactg

SEQ ID NO: 14361 - DNA, 31 bp, Artificial Sequence
  Description of Artificial Sequence:  Nucleic Acid
  misc_feature: DNAzyme
tcagtggaggctagctacaacgacaatgagg

SEQ ID NO: 14362 - DNA, 31 bp, Artificial Sequence
  Description of Artificial Sequence:  Nucleic Acid
  misc_feature: DNAzyme
tccatcagggctagctacaacgaggatcaat

SEQ ID NO: 14363 - DNA, 31 bp, Artificial Sequence
  Description of Artificial Sequence:  Nucleic Acid
  misc_feature: DNAzyme
aggctccaggctagctacaacgacagtggat

SEQ ID NO: 14364 - DNA, 31 bp, Artificial Sequence
  Description of Artificial Sequence:  Nucleic Acid
  misc_feature: DNAzyme
tgaggaggggctagctacaacgatccatcag

SEQ ID NO: 14365 - DNA, 31 bp, Artificial Sequence
  Description of Artificial Sequence:  Nucleic Acid
  misc_feature: DNAzyme
ctcagctgggctagctacaacgatgaggagg

SEQ ID NO: 14366 - DNA, 31 bp, Artificial Sequence
  Description of Artificial Sequence:  Nucleic Acid
  misc_feature: DNAzyme
tcactcagggctagctacaacgatgctgagg

SEQ ID NO: 14367 - DNA, 31 bp, Artificial Sequence
  Description of Artificial Sequence:  Nucleic Acid
  misc_feature: DNAzyme
caccatcaggctagctacaacgatcagctgc

SEQ ID NO: 14368 - DNA, 31 bp, Artificial Sequence
  Description of Artificial Sequence:  Nucleic Acid
  misc_feature: DNAzyme
cctcaccaggctagctacaacgacactcagc

SEQ ID NO: 14369 - DNA, 31 bp, Artificial Sequence
  Description of Artificial Sequence:  Nucleic Acid
  misc_feature: DNAzyme
cagcctcaggctagctacaacgacatcactc

SEQ ID NO: 14370 - DNA, 31 bp, Artificial Sequence
  Description of Artificial Sequence:  Nucleic Acid
  misc_feature: DNAzyme
ctctccagggctagctacaacgactcaccat

SEQ ID NO: 14371 - DNA, 31 bp, Artificial Sequence
  Description of Artificial Sequence:  Nucleic Acid
  misc_feature: DNAzyme
cacacaaaggctagctacaacgacctctcca

SEQ ID NO: 14372 - DNA, 31 bp, Artificial Sequence
  Description of Artificial Sequence:  Nucleic Acid
  misc_feature: DNAzyme
gcgtcacaggctagctacaacgaaaatcctc

SEQ ID NO: 14373 - DNA, 31 bp, Artificial Sequence
  Description of Artificial Sequence:  Nucleic Acid
  misc_feature: DNAzyme
gcgcgtcaggctagctacaacgaacaaatcc

SEQ ID NO: 14374 - DNA, 31 bp, Artificial Sequence
  Description of Artificial Sequence:  Nucleic Acid
  misc_feature: DNAzyme
ggcgcgcgggctagctacaacgacacacaaa

SEQ ID NO: 14375 - DNA, 31 bp, Artificial Sequence
  Description of Artificial Sequence:  Nucleic Acid
  misc_feature: DNAzyme
gcggcgcgggctagctacaacgagtcacaca

SEQ ID NO: 14376 - DNA, 31 bp, Artificial Sequence
  Description of Artificial Sequence:  Nucleic Acid
  misc_feature: DNAzyme
cagcggcgggctagctacaacgagcgtcaca

SEQ ID NO: 14377 - DNA, 31 bp, Artificial Sequence
  Description of Artificial Sequence:  Nucleic Acid
  misc_feature: DNAzyme
cgcagcggggctagctacaacgagcgcgtca

SEQ ID NO: 14378 - DNA, 31 bp, Artificial Sequence
  Description of Artificial Sequence:  Nucleic Acid
  misc_feature: DNAzyme
cgacgcagggctagctacaacgaggcgcgcg

SEQ ID NO: 14379 - DNA, 31 bp, Artificial Sequence
  Description of Artificial Sequence:  Nucleic Acid
  misc_feature: DNAzyme
gagcgacgggctagctacaacgaagcggcgc

SEQ ID NO: 14380 - DNA, 31 bp, Artificial Sequence
  Description of Artificial Sequence:  Nucleic Acid
  misc_feature: DNAzyme
gagagcgaggctagctacaacgagcagcggc

SEQ ID NO: 14381 - DNA, 31 bp, Artificial Sequence
  Description of Artificial Sequence:  Nucleic Acid
  misc_feature: DNAzyme
cctgagagggctagctacaacgagacgcagc

SEQ ID NO: 14382 - DNA, 31 bp, Artificial Sequence
  Description of Artificial Sequence:  Nucleic Acid
  misc_feature: DNAzyme
actatgtgggctagctacaacgactgagagc

SEQ ID NO: 14383 - DNA, 31 bp, Artificial Sequence
  Description of Artificial Sequence:  Nucleic Acid
  misc_feature: DNAzyme
gcactatgggctagctacaacgagcctgaga

SEQ ID NO: 14384 - DNA, 31 bp, Artificial Sequence
  Description of Artificial Sequence:  Nucleic Acid
  misc_feature: DNAzyme
acgcactaggctagctacaacgagtgcctga

SEQ ID NO: 14385 - DNA, 31 bp, Artificial Sequence
  Description of Artificial Sequence:  Nucleic Acid
  misc_feature: DNAzyme
cccacgcaggctagctacaacgatatgtgcc

SEQ ID NO: 14386 - DNA, 31 bp, Artificial Sequence
  Description of Artificial Sequence:  Nucleic Acid
  misc_feature: DNAzyme
cccccacgggctagctacaacgaactatgtg

SEQ ID NO: 14387 - DNA, 31 bp, Artificial Sequence
  Description of Artificial Sequence:  Nucleic Acid
  misc_feature: DNAzyme
ctcccccaggctagctacaacgagcactatg

SEQ ID NO: 14388 - DNA, 31 bp, Artificial Sequence
  Description of Artificial Sequence:  Nucleic Acid
  misc_feature: DNAzyme
caaccatgggctagctacaacgactccccca

SEQ ID NO: 14389 - DNA, 31 bp, Artificial Sequence
  Description of Artificial Sequence:  Nucleic Acid
  misc_feature: DNAzyme
ggcaaccaggctagctacaacgagtctcccc

SEQ ID NO: 14390 - DNA, 31 bp, Artificial Sequence
  Description of Artificial Sequence:  Nucleic Acid
  misc_feature: DNAzyme
cggggcaaggctagctacaacgacatgtctc

SEQ ID NO: 14391 - DNA, 31 bp, Artificial Sequence
  Description of Artificial Sequence:  Nucleic Acid
  misc_feature: DNAzyme
tcgcggggggctagctacaacgaaaccatgt

SEQ ID NO: 14392 - DNA, 31 bp, Artificial Sequence
  Description of Artificial Sequence:  Nucleic Acid
  misc_feature: DNAzyme
tcgcttcgggctagctacaacgaggggcaac

SEQ ID NO: 14393 - DNA, 31 bp, Artificial Sequence
  Description of Artificial Sequence:  Nucleic Acid
  misc_feature: DNAzyme
agcgttcgggctagctacaacgattcgcggg

SEQ ID NO: 14394 - DNA, 31 bp, Artificial Sequence
  Description of Artificial Sequence:  Nucleic Acid
  misc_feature: DNAzyme
tgatagcgggctagctacaacgatcgcttcg

SEQ ID NO: 14395 - DNA, 31 bp, Artificial Sequence
  Description of Artificial Sequence:  Nucleic Acid
  misc_feature: DNAzyme
gctgatagggctagctacaacgagttcgctt

SEQ ID NO: 14396 - DNA, 31 bp, Artificial Sequence
  Description of Artificial Sequence:  Nucleic Acid
  misc_feature: DNAzyme
tcggctgaggctagctacaacgaagcgttcg

SEQ ID NO: 14397 - DNA, 31 bp, Artificial Sequence
  Description of Artificial Sequence:  Nucleic Acid
  misc_feature: DNAzyme
tgaatcggggctagctacaacgatgatagcg

SEQ ID NO: 14398 - DNA, 31 bp, Artificial Sequence
  Description of Artificial Sequence:  Nucleic Acid
  misc_feature: DNAzyme
tggatgaaggctagctacaacgacggctgat

SEQ ID NO: 14399 - DNA, 31 bp, Artificial Sequence
  Description of Artificial Sequence:  Nucleic Acid
  misc_feature: DNAzyme
gcagtggaggctagctacaacgagaatcggc

SEQ ID NO: 14400 - DNA, 31 bp, Artificial Sequence
  Description of Artificial Sequence:  Nucleic Acid
  misc_feature: DNAzyme
ctgtgcagggctagctacaacgaggatgaat

SEQ ID NO: 14401 - DNA, 31 bp, Artificial Sequence
  Description of Artificial Sequence:  Nucleic Acid
  misc_feature: DNAzyme
gcgctgtgggctagctacaacgaagtggatg

SEQ ID NO: 14402 - DNA, 31 bp, Artificial Sequence
  Description of Artificial Sequence:  Nucleic Acid
  misc_feature: DNAzyme
gggcgctgggctagctacaacgagcagtgga

SEQ ID NO: 14403 - DNA, 31 bp, Artificial Sequence
  Description of Artificial Sequence:  Nucleic Acid
  misc_feature: DNAzyme
agagggcgggctagctacaacgatgtgcagt

SEQ ID NO: 14404 - DNA, 31 bp, Artificial Sequence
  Description of Artificial Sequence:  Nucleic Acid
  misc_feature: DNAzyme
ggagagggggctagctacaacgagctgtgca

SEQ ID NO: 14405 - DNA, 31 bp, Artificial Sequence
  Description of Artificial Sequence:  Nucleic Acid
  misc_feature: DNAzyme
catgtgggggctagctacaacgaccaggaga

SEQ ID NO: 14406 - DNA, 31 bp, Artificial Sequence
  Description of Artificial Sequence:  Nucleic Acid
  misc_feature: DNAzyme
tcggcatgggctagctacaacgagggcccag

SEQ ID NO: 14407 - DNA, 31 bp, Artificial Sequence
  Description of Artificial Sequence:  Nucleic Acid
  misc_feature: DNAzyme
cgtcggcaggctagctacaacgagtgggccc

SEQ ID NO: 14408 - DNA, 31 bp, Artificial Sequence
  Description of Artificial Sequence:  Nucleic Acid
  misc_feature: DNAzyme
tgcgtcggggctagctacaacgaatgtgggc

SEQ ID NO: 14409 - DNA, 31 bp, Artificial Sequence
  Description of Artificial Sequence:  Nucleic Acid
  misc_feature: DNAzyme
atactgcgggctagctacaacgacggcatgt

SEQ ID NO: 14410 - DNA, 31 bp, Artificial Sequence
  Description of Artificial Sequence:  Nucleic Acid
  misc_feature: DNAzyme
cgatactgggctagctacaacgagtcggcat

SEQ ID NO: 14411 - DNA, 31 bp, Artificial Sequence
  Description of Artificial Sequence:  Nucleic Acid
  misc_feature: DNAzyme
cagcgataggctagctacaacgatgcgtcgg

SEQ ID NO: 14412 - DNA, 31 bp, Artificial Sequence
  Description of Artificial Sequence:  Nucleic Acid
  misc_feature: DNAzyme
cgcagcgaggctagctacaacgaactgcgtc

SEQ ID NO: 14413 - DNA, 31 bp, Artificial Sequence
  Description of Artificial Sequence:  Nucleic Acid
  misc_feature: DNAzyme
gtgcgcagggctagctacaacgagatactgc

SEQ ID NO: 14414 - DNA, 31 bp, Artificial Sequence
  Description of Artificial Sequence:  Nucleic Acid
  misc_feature: DNAzyme
ggtgtgcgggctagctacaacgaagcgatac

SEQ ID NO: 14415 - DNA, 31 bp, Artificial Sequence
  Description of Artificial Sequence:  Nucleic Acid
  misc_feature: DNAzyme
gtggtgtgggctagctacaacgagcagcgat

SEQ ID NO: 14416 - DNA, 31 bp, Artificial Sequence
  Description of Artificial Sequence:  Nucleic Acid
  misc_feature: DNAzyme
gggtggtgggctagctacaacgagcgcagcg

SEQ ID NO: 14417 - DNA, 31 bp, Artificial Sequence
  Description of Artificial Sequence:  Nucleic Acid
  misc_feature: DNAzyme
cggggtggggctagctacaacgagtgcgcag

SEQ ID NO: 14418 - DNA, 31 bp, Artificial Sequence
  Description of Artificial Sequence:  Nucleic Acid
  misc_feature: DNAzyme
cgtcggggggctagctacaacgaggtgtgcg

SEQ ID NO: 14419 - DNA, 31 bp, Artificial Sequence
  Description of Artificial Sequence:  Nucleic Acid
  misc_feature: DNAzyme
cctggtcgggctagctacaacgacggggtgg

SEQ ID NO: 14420 - DNA, 31 bp, Artificial Sequence
  Description of Artificial Sequence:  Nucleic Acid
  misc_feature: DNAzyme
cgccctggggctagctacaacgacgtcgggg

SEQ ID NO: 14421 - DNA, 31 bp, Artificial Sequence
  Description of Artificial Sequence:  Nucleic Acid
  misc_feature: DNAzyme
tcctggcgggctagctacaacgacctggtcg

SEQ ID NO: 14422 - DNA, 31 bp, Artificial Sequence
  Description of Artificial Sequence:  Nucleic Acid
  misc_feature: DNAzyme
tctcctggggctagctacaacgagccctggt

SEQ ID NO: 14423 - DNA, 31 bp, Artificial Sequence
  Description of Artificial Sequence:  Nucleic Acid
  misc_feature: DNAzyme
ccctgccaggctagctacaacgacctctctc

SEQ ID NO: 14424 - DNA, 31 bp, Artificial Sequence
  Description of Artificial Sequence:  Nucleic Acid
  misc_feature: DNAzyme
actccctgggctagctacaacgacatcctct

SEQ ID NO: 14425 - DNA, 31 bp, Artificial Sequence
  Description of Artificial Sequence:  Nucleic Acid
  misc_feature: DNAzyme
tcaacttaggctagctacaacgatccctgcc

SEQ ID NO: 14426 - DNA, 31 bp, Artificial Sequence
  Description of Artificial Sequence:  Nucleic Acid
  misc_feature: DNAzyme
ctggtcaaggctagctacaacgattactccc

SEQ ID NO: 14427 - DNA, 31 bp, Artificial Sequence
  Description of Artificial Sequence:  Nucleic Acid
  misc_feature: DNAzyme
ggacctggggctagctacaacgacaacttac

SEQ ID NO: 14428 - DNA, 31 bp, Artificial Sequence
  Description of Artificial Sequence:  Nucleic Acid
  misc_feature: DNAzyme
accgaggaggctagctacaacgactggtcaa

SEQ ID NO: 14429 - DNA, 31 bp, Artificial Sequence
  Description of Artificial Sequence:  Nucleic Acid
  misc_feature: DNAzyme
gccttctaggctagctacaacgacgaggacc

SEQ ID NO: 14430 - DNA, 31 bp, Artificial Sequence
  Description of Artificial Sequence:  Nucleic Acid
  misc_feature: DNAzyme
gggagatgggctagctacaacgacttctacc

SEQ ID NO: 14431 - DNA, 31 bp, Artificial Sequence
  Description of Artificial Sequence:  Nucleic Acid
  misc_feature: DNAzyme
cggggagaggctagctacaacgagccttcta

SEQ ID NO: 14432 - DNA, 31 bp, Artificial Sequence
  Description of Artificial Sequence:  Nucleic Acid
  misc_feature: DNAzyme
gtcatgagggctagctacaacgaggggagat

SEQ ID NO: 14433 - DNA, 31 bp, Artificial Sequence
  Description of Artificial Sequence:  Nucleic Acid
  misc_feature: DNAzyme
caaggtcaggctagctacaacgagagcgggg

SEQ ID NO: 14434 - DNA, 31 bp, Artificial Sequence
  Description of Artificial Sequence:  Nucleic Acid
  misc_feature: DNAzyme
cttcaaggggctagctacaacgacatgagcg

SEQ ID NO: 14435 - DNA, 31 bp, Artificial Sequence
  Description of Artificial Sequence:  Nucleic Acid
  misc_feature: DNAzyme
tctcgtggggctagctacaacgacttcaagg

SEQ ID NO: 14436 - DNA, 31 bp, Artificial Sequence
  Description of Artificial Sequence:  Nucleic Acid
  misc_feature: DNAzyme
tgctctcgggctagctacaacgaggccttca

SEQ ID NO: 14437 - DNA, 31 bp, Artificial Sequence
  Description of Artificial Sequence:  Nucleic Acid
  misc_feature: DNAzyme
ggcgggtgggctagctacaacgatctcgtgg

SEQ ID NO: 14438 - DNA, 31 bp, Artificial Sequence
  Description of Artificial Sequence:  Nucleic Acid
  misc_feature: DNAzyme
gtggcgggggctagctacaacgagctctcgt

SEQ ID NO: 14439 - DNA, 31 bp, Artificial Sequence
  Description of Artificial Sequence:  Nucleic Acid
  misc_feature: DNAzyme
aggagtggggctagctacaacgagggtgctc

SEQ ID NO: 14440 - DNA, 31 bp, Artificial Sequence
  Description of Artificial Sequence:  Nucleic Acid
  misc_feature: DNAzyme
agcaggagggctagctacaacgaggcgggtg

SEQ ID NO: 14441 - DNA, 31 bp, Artificial Sequence
  Description of Artificial Sequence:  Nucleic Acid
  misc_feature: DNAzyme
ctatggagggctagctacaacgaaggagtgg

SEQ ID NO: 14442 - DNA, 31 bp, Artificial Sequence
  Description of Artificial Sequence:  Nucleic Acid
  misc_feature: DNAzyme
gcgggctaggctagctacaacgaggagcagg

SEQ ID NO: 14443 - DNA, 31 bp, Artificial Sequence
  Description of Artificial Sequence:  Nucleic Acid
  misc_feature: DNAzyme
ctggcgggggctagctacaacgatatggagc

SEQ ID NO: 14444 - DNA, 31 bp, Artificial Sequence
  Description of Artificial Sequence:  Nucleic Acid
  misc_feature: DNAzyme
cattctggggctagctacaacgagggctatg

SEQ ID NO: 14445 - DNA, 31 bp, Artificial Sequence
  Description of Artificial Sequence:  Nucleic Acid
  misc_feature: DNAzyme
tgtagacaggctagctacaacgatctggcgg

SEQ ID NO: 14446 - DNA, 31 bp, Artificial Sequence
  Description of Artificial Sequence:  Nucleic Acid
  misc_feature: DNAzyme
cttgtagaggctagctacaacgaattctggc

SEQ ID NO: 14447 - DNA, 31 bp, Artificial Sequence
  Description of Artificial Sequence:  Nucleic Acid
  misc_feature: DNAzyme
ggtgcttgggctagctacaacgaagacattc

SEQ ID NO: 14448 - DNA, 31 bp, Artificial Sequence
  Description of Artificial Sequence:  Nucleic Acid
  misc_feature: DNAzyme
ggaaggtgggctagctacaacgattgtagac

SEQ ID NO: 14449 - DNA, 31 bp, Artificial Sequence
  Description of Artificial Sequence:  Nucleic Acid
  misc_feature: DNAzyme
tgggaaggggctagctacaacgagcttgtag

SEQ ID NO: 14450 - DNA, 31 bp, Artificial Sequence
  Description of Artificial Sequence:  Nucleic Acid
  misc_feature: DNAzyme
agcataggggctagctacaacgacttgggaa

SEQ ID NO: 14451 - DNA, 31 bp, Artificial Sequence
  Description of Artificial Sequence:  Nucleic Acid
  misc_feature: DNAzyme
tggcagcaggctagctacaacgaaggccttg

SEQ ID NO: 14452 - DNA, 31 bp, Artificial Sequence
  Description of Artificial Sequence:  Nucleic Acid
  misc_feature: DNAzyme
gttggcagggctagctacaacgaataggcct

SEQ ID NO: 14453 - DNA, 31 bp, Artificial Sequence
  Description of Artificial Sequence:  Nucleic Acid
  misc_feature: DNAzyme
gctgttggggctagctacaacgaagcatagg

SEQ ID NO: 14454 - DNA, 31 bp, Artificial Sequence
  Description of Artificial Sequence:  Nucleic Acid
  misc_feature: DNAzyme
cgcggctgggctagctacaacgatggcagca

SEQ ID NO: 14455 - DNA, 31 bp, Artificial Sequence
  Description of Artificial Sequence:  Nucleic Acid
  misc_feature: DNAzyme
tggcgcggggctagctacaacgatgttggca

SEQ ID NO: 14456 - DNA, 31 bp, Artificial Sequence
  Description of Artificial Sequence:  Nucleic Acid
  misc_feature: DNAzyme
cgctggcgggctagctacaacgaggctgttg

SEQ ID NO: 14457 - DNA, 31 bp, Artificial Sequence
  Description of Artificial Sequence:  Nucleic Acid
  misc_feature: DNAzyme
atcgctggggctagctacaacgagcggctgt

SEQ ID NO: 14458 - DNA, 31 bp, Artificial Sequence
  Description of Artificial Sequence:  Nucleic Acid
  misc_feature: DNAzyme
cggcatcgggctagctacaacgatggcgcgg

SEQ ID NO: 14459 - DNA, 31 bp, Artificial Sequence
  Description of Artificial Sequence:  Nucleic Acid
  misc_feature: DNAzyme
cgccggcaggctagctacaacgacgctggcg

SEQ ID NO: 14460 - DNA, 31 bp, Artificial Sequence
  Description of Artificial Sequence:  Nucleic Acid
  misc_feature: DNAzyme
ggcgccggggctagctacaacgaatcgctgg

SEQ ID NO: 14461 - DNA, 31 bp, Artificial Sequence
  Description of Artificial Sequence:  Nucleic Acid
  misc_feature: DNAzyme
cgtgggcgggctagctacaacgacggcatcg

SEQ ID NO: 14462 - DNA, 31 bp, Artificial Sequence
  Description of Artificial Sequence:  Nucleic Acid
  misc_feature: DNAzyme
ttcgtgggggctagctacaacgagccggcat

SEQ ID NO: 14463 - DNA, 31 bp, Artificial Sequence
  Description of Artificial Sequence:  Nucleic Acid
  misc_feature: DNAzyme
ggccttcgggctagctacaacgagggcgccg

SEQ ID NO: 14464 - DNA, 31 bp, Artificial Sequence
  Description of Artificial Sequence:  Nucleic Acid
  misc_feature: DNAzyme
cgtttcggggctagctacaacgacttcgtgg

SEQ ID NO: 14465 - DNA, 31 bp, Artificial Sequence
  Description of Artificial Sequence:  Nucleic Acid
  misc_feature: DNAzyme
cagagccgggctagctacaacgattcggcct

SEQ ID NO: 14466 - DNA, 31 bp, Artificial Sequence
  Description of Artificial Sequence:  Nucleic Acid
  misc_feature: DNAzyme
ccccagagggctagctacaacgacgtttcgg

SEQ ID NO: 14467 - DNA, 31 bp, Artificial Sequence
  Description of Artificial Sequence:  Nucleic Acid
  misc_feature: DNAzyme
ccaactcgggctagctacaacgatcccccca

SEQ ID NO: 14468 - DNA, 31 bp, Artificial Sequence
  Description of Artificial Sequence:  Nucleic Acid
  misc_feature: DNAzyme
ccgcccaaggctagctacaacgatcgctccc

SEQ ID NO: 14469 - DNA, 31 bp, Artificial Sequence
  Description of Artificial Sequence:  Nucleic Acid
  misc_feature: DNAzyme
ggtggccgggctagctacaacgaccaactcg

SEQ ID NO: 14470 - DNA, 31 bp, Artificial Sequence
  Description of Artificial Sequence:  Nucleic Acid
  misc_feature: DNAzyme
gtgggtggggctagctacaacgacgcccaac

SEQ ID NO: 14471 - DNA, 31 bp, Artificial Sequence
  Description of Artificial Sequence:  Nucleic Acid
  misc_feature: DNAzyme
agggtgggggctagctacaacgaggccgccc

SEQ ID NO: 14472 - DNA, 31 bp, Artificial Sequence
  Description of Artificial Sequence:  Nucleic Acid
  misc_feature: DNAzyme
tgggagggggctagctacaacgagggtggcc

SEQ ID NO: 14473 - DNA, 31 bp, Artificial Sequence
  Description of Artificial Sequence:  Nucleic Acid
  misc_feature: DNAzyme
gttcaacaggctagctacaacgacttgggag

SEQ ID NO: 14474 - DNA, 31 bp, Artificial Sequence
  Description of Artificial Sequence:  Nucleic Acid
  misc_feature: DNAzyme
ctgttcaaggctagctacaacgaatcttggg

SEQ ID NO: 14475 - DNA, 31 bp, Artificial Sequence
  Description of Artificial Sequence:  Nucleic Acid
  misc_feature: DNAzyme
ccctcctgggctagctacaacgatcaacatc

SEQ ID NO: 14476 - DNA, 31 bp, Artificial Sequence
  Description of Artificial Sequence:  Nucleic Acid
  misc_feature: DNAzyme
ccaaagcaggctagctacaacgacctcctgt

SEQ ID NO: 14477 - DNA, 31 bp, Artificial Sequence
  Description of Artificial Sequence:  Nucleic Acid
  misc_feature: DNAzyme
acccaaagggctagctacaacgaaccctcct

SEQ ID NO: 14478 - DNA, 31 bp, Artificial Sequence
  Description of Artificial Sequence:  Nucleic Acid
  misc_feature: DNAzyme
gctcaccaggctagctacaacgaccaaagca

SEQ ID NO: 14479 - DNA, 31 bp, Artificial Sequence
  Description of Artificial Sequence:  Nucleic Acid
  misc_feature: DNAzyme
cccgctcaggctagctacaacgacacccaaa

SEQ ID NO: 14480 - DNA, 31 bp, Artificial Sequence
  Description of Artificial Sequence:  Nucleic Acid
  misc_feature: DNAzyme
ccagcccgggctagctacaacgatcaccacc

SEQ ID NO: 14481 - DNA, 31 bp, Artificial Sequence
  Description of Artificial Sequence:  Nucleic Acid
  misc_feature: DNAzyme
atcaccagggctagctacaacgaccgctcac

SEQ ID NO: 14482 - DNA, 31 bp, Artificial Sequence
  Description of Artificial Sequence:  Nucleic Acid
  misc_feature: DNAzyme
ctccatcaggctagctacaacgacagcccgc

SEQ ID NO: 14483 - DNA, 31 bp, Artificial Sequence
  Description of Artificial Sequence:  Nucleic Acid
  misc_feature: DNAzyme
agcctccaggctagctacaacgacaccagcc

SEQ ID NO: 14484 - DNA, 31 bp, Artificial Sequence
  Description of Artificial Sequence:  Nucleic Acid
  misc_feature: DNAzyme
attcacagggctagctacaacgactccatca

SEQ ID NO: 14485 - DNA, 31 bp, Artificial Sequence
  Description of Artificial Sequence:  Nucleic Acid
  misc_feature: DNAzyme
ggcattcaggctagctacaacgaagcctcca

SEQ ID NO: 14486 - DNA, 31 bp, Artificial Sequence
  Description of Artificial Sequence:  Nucleic Acid
  misc_feature: DNAzyme
tgatggcaggctagctacaacgatcacagcc

SEQ ID NO: 14487 - DNA, 31 bp, Artificial Sequence
  Description of Artificial Sequence:  Nucleic Acid
  misc_feature: DNAzyme
attgatggggctagctacaacgaattcacag

SEQ ID NO: 14488 - DNA, 31 bp, Artificial Sequence
  Description of Artificial Sequence:  Nucleic Acid
  misc_feature: DNAzyme
atcattgaggctagctacaacgaggcattca

SEQ ID NO: 14489 - DNA, 31 bp, Artificial Sequence
  Description of Artificial Sequence:  Nucleic Acid
  misc_feature: DNAzyme
tagcatcaggctagctacaacgatgatggca

SEQ ID NO: 14490 - DNA, 31 bp, Artificial Sequence
  Description of Artificial Sequence:  Nucleic Acid
  misc_feature: DNAzyme
cgatagcaggctagctacaacgacattgatg

SEQ ID NO: 14491 - DNA, 31 bp, Artificial Sequence
  Description of Artificial Sequence:  Nucleic Acid
  misc_feature: DNAzyme
cgcgatagggctagctacaacgaatcattga

SEQ ID NO: 14492 - DNA, 31 bp, Artificial Sequence
  Description of Artificial Sequence:  Nucleic Acid
  misc_feature: DNAzyme
ccccgcgaggctagctacaacgaagcatcat

SEQ ID NO: 14493 - DNA, 31 bp, Artificial Sequence
  Description of Artificial Sequence:  Nucleic Acid
  misc_feature: DNAzyme
gaaccccgggctagctacaacgagatagcat

SEQ ID NO: 14494 - DNA, 31 bp, Artificial Sequence
  Description of Artificial Sequence:  Nucleic Acid
  misc_feature: DNAzyme
cctgggaaggctagctacaacgacccgcgat

SEQ ID NO: 14495 - DNA, 31 bp, Artificial Sequence
  Description of Artificial Sequence:  Nucleic Acid
  misc_feature: DNAzyme
ccactctgggctagctacaacgactgggaac

SEQ ID NO: 14496 - DNA, 31 bp, Artificial Sequence
  Description of Artificial Sequence:  Nucleic Acid
  misc_feature: DNAzyme
cttgtccaggctagctacaacgatctgcctg

SEQ ID NO: 14497 - DNA, 31 bp, Artificial Sequence
  Description of Artificial Sequence:  Nucleic Acid
  misc_feature: DNAzyme
caggcttgggctagctacaacgaccactctg

SEQ ID NO: 14498 - DNA, 31 bp, Artificial Sequence
  Description of Artificial Sequence:  Nucleic Acid
  misc_feature: DNAzyme
ctagcaggggctagctacaacgattgtccac

SEQ ID NO: 14499 - DNA, 31 bp, Artificial Sequence
  Description of Artificial Sequence:  Nucleic Acid
  misc_feature: DNAzyme
gtacctagggctagctacaacgaaggcttgt

SEQ ID NO: 14500 - DNA, 31 bp, Artificial Sequence
  Description of Artificial Sequence:  Nucleic Acid
  misc_feature: DNAzyme
atacagtaggctagctacaacgactagcagg

SEQ ID NO: 14501 - DNA, 31 bp, Artificial Sequence
  Description of Artificial Sequence:  Nucleic Acid
  misc_feature: DNAzyme
ggatacagggctagctacaacgaacctagca

SEQ ID NO: 14502 - DNA, 31 bp, Artificial Sequence
  Description of Artificial Sequence:  Nucleic Acid
  misc_feature: DNAzyme
gcgggataggctagctacaacgaagtaccta

SEQ ID NO: 14503 - DNA, 31 bp, Artificial Sequence
  Description of Artificial Sequence:  Nucleic Acid
  misc_feature: DNAzyme
cagcgggaggctagctacaacgaacagtacc

SEQ ID NO: 14504 - DNA, 31 bp, Artificial Sequence
  Description of Artificial Sequence:  Nucleic Acid
  misc_feature: DNAzyme
ttcatcagggctagctacaacgagggataca

SEQ ID NO: 14505 - DNA, 31 bp, Artificial Sequence
  Description of Artificial Sequence:  Nucleic Acid
  misc_feature: DNAzyme
gaatttcaggctagctacaacgacagcggga

SEQ ID NO: 14506 - DNA, 31 bp, Artificial Sequence
  Description of Artificial Sequence:  Nucleic Acid
  misc_feature: DNAzyme
atgtggaaggctagctacaacgattcatcag

SEQ ID NO: 14507 - DNA, 31 bp, Artificial Sequence
  Description of Artificial Sequence:  Nucleic Acid
  misc_feature: DNAzyme
agcacatgggctagctacaacgaggaatttc

SEQ ID NO: 14508 - DNA, 31 bp, Artificial Sequence
  Description of Artificial Sequence:  Nucleic Acid
  misc_feature: DNAzyme
gaagcacaggctagctacaacgagtggaatt

SEQ ID NO: 14509 - DNA, 31 bp, Artificial Sequence
  Description of Artificial Sequence:  Nucleic Acid
  misc_feature: DNAzyme
gcgaagcaggctagctacaacgaatgtggaa

SEQ ID NO: 14510 - DNA, 31 bp, Artificial Sequence
  Description of Artificial Sequence:  Nucleic Acid
  misc_feature: DNAzyme
gggcgaagggctagctacaacgaacatgtgg

SEQ ID NO: 14511 - DNA, 31 bp, Artificial Sequence
  Description of Artificial Sequence:  Nucleic Acid
  misc_feature: DNAzyme
tttctgggggctagctacaacgagaagcaca

SEQ ID NO: 14512 - DNA, 31 bp, Artificial Sequence
  Description of Artificial Sequence:  Nucleic Acid
  misc_feature: DNAzyme
ccttgaggggctagctacaacgatttctggg

SEQ ID NO: 14513 - DNA, 31 bp, Artificial Sequence
  Description of Artificial Sequence:  Nucleic Acid
  misc_feature: DNAzyme
gtggcgagggctagctacaacgaccttgagg

SEQ ID NO: 14514 - DNA, 31 bp, Artificial Sequence
  Description of Artificial Sequence:  Nucleic Acid
  misc_feature: DNAzyme
ccaagtggggctagctacaacgagagccctt

SEQ ID NO: 14515 - DNA, 31 bp, Artificial Sequence
  Description of Artificial Sequence:  Nucleic Acid
  misc_feature: DNAzyme
aatccaagggctagctacaacgaggcgagcc

SEQ ID NO: 14516 - DNA, 31 bp, Artificial Sequence
  Description of Artificial Sequence:  Nucleic Acid
  misc_feature: DNAzyme
tggtggaaggctagctacaacgaccaagtgg

SEQ ID NO: 14517 - DNA, 31 bp, Artificial Sequence
  Description of Artificial Sequence:  Nucleic Acid
  misc_feature: DNAzyme
tcccgtggggctagctacaacgaggaatcca

SEQ ID NO: 14518 - DNA, 31 bp, Artificial Sequence
  Description of Artificial Sequence:  Nucleic Acid
  misc_feature: DNAzyme
tgctcccgggctagctacaacgaggtggaat

SEQ ID NO: 14519 - DNA, 31 bp, Artificial Sequence
  Description of Artificial Sequence:  Nucleic Acid
  misc_feature: DNAzyme
ggctgctgggctagctacaacgatcccgtgg

SEQ ID NO: 14520 - DNA, 31 bp, Artificial Sequence
  Description of Artificial Sequence:  Nucleic Acid
  misc_feature: DNAzyme
ggaggctgggctagctacaacgatgctcccg

SEQ ID NO: 14521 - DNA, 31 bp, Artificial Sequence
  Description of Artificial Sequence:  Nucleic Acid
  misc_feature: DNAzyme
agcggaggggctagctacaacgatgctgctc

SEQ ID NO: 14522 - DNA, 31 bp, Artificial Sequence
  Description of Artificial Sequence:  Nucleic Acid
  misc_feature: DNAzyme
caaccaagggctagctacaacgaggaggctg

SEQ ID NO: 14523 - DNA, 31 bp, Artificial Sequence
  Description of Artificial Sequence:  Nucleic Acid
  misc_feature: DNAzyme
gccaccaaggctagctacaacgacaagcgga

SEQ ID NO: 14524 - DNA, 31 bp, Artificial Sequence
  Description of Artificial Sequence:  Nucleic Acid
  misc_feature: DNAzyme
aacagccaggctagctacaacgacaaccaag

SEQ ID NO: 14525 - DNA, 31 bp, Artificial Sequence
  Description of Artificial Sequence:  Nucleic Acid
  misc_feature: DNAzyme
gcaaacagggctagctacaacgacaccaacc

SEQ ID NO: 14526 - DNA, 31 bp, Artificial Sequence
  Description of Artificial Sequence:  Nucleic Acid
  misc_feature: DNAzyme
gctgcaaaggctagctacaacgaagccacca

SEQ ID NO: 14527 - DNA, 31 bp, Artificial Sequence
  Description of Artificial Sequence:  Nucleic Acid
  misc_feature: DNAzyme
gattgctgggctagctacaacgaaaacagcc

SEQ ID NO: 14528 - DNA, 31 bp, Artificial Sequence
  Description of Artificial Sequence:  Nucleic Acid
  misc_feature: DNAzyme
tcggattgggctagctacaacgatgcaaaca

SEQ ID NO: 14529 - DNA, 31 bp, Artificial Sequence
  Description of Artificial Sequence:  Nucleic Acid
  misc_feature: DNAzyme
cgctcggaggctagctacaacgatgctgcaa

SEQ ID NO: 14530 - DNA, 31 bp, Artificial Sequence
  Description of Artificial Sequence:  Nucleic Acid
  misc_feature: DNAzyme
agaaggcgggctagctacaacgatcggattg

SEQ ID NO: 14531 - DNA, 31 bp, Artificial Sequence
  Description of Artificial Sequence:  Nucleic Acid
  misc_feature: DNAzyme
gcagaaggggctagctacaacgagctcggat

SEQ ID NO: 14532 - DNA, 31 bp, Artificial Sequence
  Description of Artificial Sequence:  Nucleic Acid
  misc_feature: DNAzyme
agttcaagggctagctacaacgaagaaggcg

SEQ ID NO: 14533 - DNA, 31 bp, Artificial Sequence
  Description of Artificial Sequence:  Nucleic Acid
  misc_feature: DNAzyme
ccgagcagggctagctacaacgatcaagcag

SEQ ID NO: 14534 - DNA, 31 bp, Artificial Sequence
  Description of Artificial Sequence:  Nucleic Acid
  misc_feature: DNAzyme
tcgccgagggctagctacaacgaagttcaag

SEQ ID NO: 14535 - DNA, 31 bp, Artificial Sequence
  Description of Artificial Sequence:  Nucleic Acid
  misc_feature: DNAzyme
gcagctcgggctagctacaacgacgagcagt

SEQ ID NO: 14536 - DNA, 31 bp, Artificial Sequence
  Description of Artificial Sequence:  Nucleic Acid
  misc_feature: DNAzyme
ggatgcagggctagctacaacgatcgccgag

SEQ ID NO: 14537 - DNA, 31 bp, Artificial Sequence
  Description of Artificial Sequence:  Nucleic Acid
  misc_feature: DNAzyme
aggggatgggctagctacaacgaagctcgcc

SEQ ID NO: 14538 - DNA, 31 bp, Artificial Sequence
  Description of Artificial Sequence:  Nucleic Acid
  misc_feature: DNAzyme
acaggggaggctagctacaacgagcagctcg

SEQ ID NO: 14539 - DNA, 31 bp, Artificial Sequence
  Description of Artificial Sequence:  Nucleic Acid
  misc_feature: DNAzyme
acatcgaaggctagctacaacgaaggggatg

SEQ ID NO: 14540 - DNA, 31 bp, Artificial Sequence
  Description of Artificial Sequence:  Nucleic Acid
  misc_feature: DNAzyme
cccttacaggctagctacaacgacgaacagg

SEQ ID NO: 14541 - DNA, 31 bp, Artificial Sequence
  Description of Artificial Sequence:  Nucleic Acid
  misc_feature: DNAzyme
ctcccttaggctagctacaacgaatcgaaca

SEQ ID NO: 14542 - DNA, 31 bp, Artificial Sequence
  Description of Artificial Sequence:  Nucleic Acid
  misc_feature: DNAzyme
gcctcacaggctagctacaacgactccctta

SEQ ID NO: 14543 - DNA, 31 bp, Artificial Sequence
  Description of Artificial Sequence:  Nucleic Acid
  misc_feature: DNAzyme
gtgcctcaggctagctacaacgaacctccct

SEQ ID NO: 14544 - DNA, 31 bp, Artificial Sequence
  Description of Artificial Sequence:  Nucleic Acid
  misc_feature: DNAzyme
ggagtgtgggctagctacaacgactcacacc

SEQ ID NO: 14545 - DNA, 31 bp, Artificial Sequence
  Description of Artificial Sequence:  Nucleic Acid
  misc_feature: DNAzyme
gaggagtgggctagctacaacgagcctcaca

SEQ ID NO: 14546 - DNA, 31 bp, Artificial Sequence
  Description of Artificial Sequence:  Nucleic Acid
  misc_feature: DNAzyme
tggaggagggctagctacaacgagtgcctca

SEQ ID NO: 14547 - DNA, 31 bp, Artificial Sequence
  Description of Artificial Sequence:  Nucleic Acid
  misc_feature: DNAzyme
cgatgagaggctagctacaacgaggaggagt

SEQ ID NO: 14548 - DNA, 31 bp, Artificial Sequence
  Description of Artificial Sequence:  Nucleic Acid
  misc_feature: DNAzyme
gagttcgaggctagctacaacgagagatgga

SEQ ID NO: 14549 - DNA, 31 bp, Artificial Sequence
  Description of Artificial Sequence:  Nucleic Acid
  misc_feature: DNAzyme
accaggagggctagctacaacgatcgatgag

SEQ ID NO: 14550 - DNA, 31 bp, Artificial Sequence
  Description of Artificial Sequence:  Nucleic Acid
  misc_feature: DNAzyme
gctctctaggctagctacaacgacaggagtt

SEQ ID NO: 14551 - DNA, 31 bp, Artificial Sequence
  Description of Artificial Sequence:  Nucleic Acid
  misc_feature: DNAzyme
cagggaggggctagctacaacgatctctacc

SEQ ID NO: 14552 - DNA, 31 bp, Artificial Sequence
  Description of Artificial Sequence:  Nucleic Acid
  misc_feature: DNAzyme
atccccgaggctagctacaacgaagggaggc

SEQ ID NO: 14553 - DNA, 31 bp, Artificial Sequence
  Description of Artificial Sequence:  Nucleic Acid
  misc_feature: DNAzyme
ggctgttaggctagctacaacgaccccgaca

SEQ ID NO: 14554 - DNA, 31 bp, Artificial Sequence
  Description of Artificial Sequence:  Nucleic Acid
  misc_feature: DNAzyme
gccggctgggctagctacaacgatatccccg

SEQ ID NO: 14555 - DNA, 31 bp, Artificial Sequence
  Description of Artificial Sequence:  Nucleic Acid
  misc_feature: DNAzyme
gaagccggggctagctacaacgatgttatcc

SEQ ID NO: 14556 - DNA, 31 bp, Artificial Sequence
  Description of Artificial Sequence:  Nucleic Acid
  misc_feature: DNAzyme
ccgggaagggctagctacaacgacggctgtt

SEQ ID NO: 14557 - DNA, 31 bp, Artificial Sequence
  Description of Artificial Sequence:  Nucleic Acid
  misc_feature: DNAzyme
tcatcttgggctagctacaacgaccgggaag

SEQ ID NO: 14558 - DNA, 31 bp, Artificial Sequence
  Description of Artificial Sequence:  Nucleic Acid
  misc_feature: DNAzyme
cagaatcaggctagctacaacgacttgtccg

SEQ ID NO: 14559 - DNA, 31 bp, Artificial Sequence
  Description of Artificial Sequence:  Nucleic Acid
  misc_feature: DNAzyme
gggcagaaggctagctacaacgacatcttgt

SEQ ID NO: 14560 - DNA, 31 bp, Artificial Sequence
  Description of Artificial Sequence:  Nucleic Acid
  misc_feature: DNAzyme
attgtgggggctagctacaacgaagaatcat

SEQ ID NO: 14561 - DNA, 31 bp, Artificial Sequence
  Description of Artificial Sequence:  Nucleic Acid
  misc_feature: DNAzyme
ggtcattgggctagctacaacgagggcagaa

SEQ ID NO: 14562 - DNA, 31 bp, Artificial Sequence
  Description of Artificial Sequence:  Nucleic Acid
  misc_feature: DNAzyme
cgtggtcaggctagctacaacgatgtgggca

SEQ ID NO: 14563 - DNA, 31 bp, Artificial Sequence
  Description of Artificial Sequence:  Nucleic Acid
  misc_feature: DNAzyme
cagcgtggggctagctacaacgacattgtgg

SEQ ID NO: 14564 - DNA, 31 bp, Artificial Sequence
  Description of Artificial Sequence:  Nucleic Acid
  misc_feature: DNAzyme
aggcagcgggctagctacaacgaggtcattg

SEQ ID NO: 14565 - DNA, 31 bp, Artificial Sequence
  Description of Artificial Sequence:  Nucleic Acid
  misc_feature: DNAzyme
acaggcagggctagctacaacgagtggtcat

SEQ ID NO: 14566 - DNA, 31 bp, Artificial Sequence
  Description of Artificial Sequence:  Nucleic Acid
  misc_feature: DNAzyme
acgacaggggctagctacaacgaagcgtggt

SEQ ID NO: 14567 - DNA, 31 bp, Artificial Sequence
  Description of Artificial Sequence:  Nucleic Acid
  misc_feature: DNAzyme
cctgacgaggctagctacaacgaaggcagcg

SEQ ID NO: 14568 - DNA, 31 bp, Artificial Sequence
  Description of Artificial Sequence:  Nucleic Acid
  misc_feature: DNAzyme
ttgcctgaggctagctacaacgagacaggca

SEQ ID NO: 14569 - DNA, 31 bp, Artificial Sequence
  Description of Artificial Sequence:  Nucleic Acid
  misc_feature: DNAzyme
gcgtattgggctagctacaacgactgacgac

SEQ ID NO: 14570 - DNA, 31 bp, Artificial Sequence
  Description of Artificial Sequence:  Nucleic Acid
  misc_feature: DNAzyme
accgcgtaggctagctacaacgatgcctgac

SEQ ID NO: 14571 - DNA, 31 bp, Artificial Sequence
  Description of Artificial Sequence:  Nucleic Acid
  misc_feature: DNAzyme
tgaccgcgggctagctacaacgaattgcctg

SEQ ID NO: 14572 - DNA, 31 bp, Artificial Sequence
  Description of Artificial Sequence:  Nucleic Acid
  misc_feature: DNAzyme
tctgaccgggctagctacaacgagtattgcc

SEQ ID NO: 14573 - DNA, 31 bp, Artificial Sequence
  Description of Artificial Sequence:  Nucleic Acid
  misc_feature: DNAzyme
agctctgaggctagctacaacgacgcgtatt

SEQ ID NO: 14574 - DNA, 31 bp, Artificial Sequence
  Description of Artificial Sequence:  Nucleic Acid
  misc_feature: DNAzyme
cctggcagggctagctacaacgatctgaccg

SEQ ID NO: 14575 - DNA, 31 bp, Artificial Sequence
  Description of Artificial Sequence:  Nucleic Acid
  misc_feature: DNAzyme
cgtcctggggctagctacaacgaagctctga

SEQ ID NO: 14576 - DNA, 31 bp, Artificial Sequence
  Description of Artificial Sequence:  Nucleic Acid
  misc_feature: DNAzyme
aggtggcgggctagctacaacgacctggcag

SEQ ID NO: 14577 - DNA, 31 bp, Artificial Sequence
  Description of Artificial Sequence:  Nucleic Acid
  misc_feature: DNAzyme
gtaggtggggctagctacaacgagtcctggc

SEQ ID NO: 14578 - DNA, 31 bp, Artificial Sequence
  Description of Artificial Sequence:  Nucleic Acid
  misc_feature: DNAzyme
ctagtaggggctagctacaacgaggcgtcct

SEQ ID NO: 14579 - DNA, 31 bp, Artificial Sequence
  Description of Artificial Sequence:  Nucleic Acid
  misc_feature: DNAzyme
ggtgctagggctagctacaacgaaggtggcg

SEQ ID NO: 14580 - DNA, 31 bp, Artificial Sequence
  Description of Artificial Sequence:  Nucleic Acid
  misc_feature: DNAzyme
cctgggtgggctagctacaacgatagtaggt

SEQ ID NO: 14581 - DNA, 31 bp, Artificial Sequence
  Description of Artificial Sequence:  Nucleic Acid
  misc_feature: DNAzyme
cacctgggggctagctacaacgagctagtag

SEQ ID NO: 14582 - DNA, 31 bp, Artificial Sequence
  Description of Artificial Sequence:  Nucleic Acid
  misc_feature: DNAzyme
caccagcaggctagctacaacgactgggtgc

SEQ ID NO: 14583 - DNA, 31 bp, Artificial Sequence
  Description of Artificial Sequence:  Nucleic Acid
  misc_feature: DNAzyme
gtcaccagggctagctacaacgaacctgggt

SEQ ID NO: 14584 - DNA, 31 bp, Artificial Sequence
  Description of Artificial Sequence:  Nucleic Acid
  misc_feature: DNAzyme
ggtcgtcaggctagctacaacgacagcacct

SEQ ID NO: 14585 - DNA, 31 bp, Artificial Sequence
  Description of Artificial Sequence:  Nucleic Acid
  misc_feature: DNAzyme
ggaggtcgggctagctacaacgacaccagca

SEQ ID NO: 14586 - DNA, 31 bp, Artificial Sequence
  Description of Artificial Sequence:  Nucleic Acid
  misc_feature: DNAzyme
cctggaggggctagctacaacgacgtcacca

SEQ ID NO: 14587 - DNA, 31 bp, Artificial Sequence
  Description of Artificial Sequence:  Nucleic Acid
  misc_feature: DNAzyme
tcggctgaggctagctacaacgactggaggt

SEQ ID NO: 14588 - DNA, 31 bp, Artificial Sequence
  Description of Artificial Sequence:  Nucleic Acid
  misc_feature: DNAzyme
catgtcggggctagctacaacgatgacctgg

SEQ ID NO: 14589 - DNA, 31 bp, Artificial Sequence
  Description of Artificial Sequence:  Nucleic Acid
  misc_feature: DNAzyme
catgcatgggctagctacaacgacggctgac

SEQ ID NO: 14590 - DNA, 31 bp, Artificial Sequence
  Description of Artificial Sequence:  Nucleic Acid
  misc_feature: DNAzyme
gacatgcaggctagctacaacgagtcggctg

SEQ ID NO: 14591 - DNA, 31 bp, Artificial Sequence
  Description of Artificial Sequence:  Nucleic Acid
  misc_feature: DNAzyme
atgacatgggctagctacaacgaatgtcggc

SEQ ID NO: 14592 - DNA, 31 bp, Artificial Sequence
  Description of Artificial Sequence:  Nucleic Acid
  misc_feature: DNAzyme
tcatgacaggctagctacaacgagcatgtcg

SEQ ID NO: 14593 - DNA, 31 bp, Artificial Sequence
  Description of Artificial Sequence:  Nucleic Acid
  misc_feature: DNAzyme
catcatgaggctagctacaacgaatgcatgt

SEQ ID NO: 14594 - DNA, 31 bp, Artificial Sequence
  Description of Artificial Sequence:  Nucleic Acid
  misc_feature: DNAzyme
atacatcaggctagctacaacgagacatgca

SEQ ID NO: 14595 - DNA, 31 bp, Artificial Sequence
  Description of Artificial Sequence:  Nucleic Acid
  misc_feature: DNAzyme
caaatacaggctagctacaacgacatgacat

SEQ ID NO: 14596 - DNA, 31 bp, Artificial Sequence
  Description of Artificial Sequence:  Nucleic Acid
  misc_feature: DNAzyme
accaaataggctagctacaacgaatcatgac

SEQ ID NO: 14597 - DNA, 31 bp, Artificial Sequence
  Description of Artificial Sequence:  Nucleic Acid
  misc_feature: DNAzyme
taaccaaaggctagctacaacgaacatcatg

SEQ ID NO: 14598 - DNA, 31 bp, Artificial Sequence
  Description of Artificial Sequence:  Nucleic Acid
  misc_feature: DNAzyme
ccccataaggctagctacaacgacaaataca

SEQ ID NO: 14599 - DNA, 31 bp, Artificial Sequence
  Description of Artificial Sequence:  Nucleic Acid
  misc_feature: DNAzyme
acaccccaggctagctacaacgaaaccaaat

SEQ ID NO: 14600 - DNA, 31 bp, Artificial Sequence
  Description of Artificial Sequence:  Nucleic Acid
  misc_feature: DNAzyme
ctcacacaggctagctacaacgacccataac

SEQ ID NO: 14601 - DNA, 31 bp, Artificial Sequence
  Description of Artificial Sequence:  Nucleic Acid
  misc_feature: DNAzyme
ccctcacaggctagctacaacgaaccccata

SEQ ID NO: 14602 - DNA, 31 bp, Artificial Sequence
  Description of Artificial Sequence:  Nucleic Acid
  misc_feature: DNAzyme
caccctcaggctagctacaacgaacacccca

SEQ ID NO: 14603 - DNA, 31 bp, Artificial Sequence
  Description of Artificial Sequence:  Nucleic Acid
  misc_feature: DNAzyme
tgatgtcaggctagctacaacgacctcacac

SEQ ID NO: 14604 - DNA, 31 bp, Artificial Sequence
  Description of Artificial Sequence:  Nucleic Acid
  misc_feature: DNAzyme
aaatgatgggctagctacaacgacaccctca

SEQ ID NO: 14605 - DNA, 31 bp, Artificial Sequence
  Description of Artificial Sequence:  Nucleic Acid
  misc_feature: DNAzyme
caaaatgaggctagctacaacgagtcaccct

SEQ ID NO: 14606 - DNA, 31 bp, Artificial Sequence
  Description of Artificial Sequence:  Nucleic Acid
  misc_feature: DNAzyme
gtccaaaaggctagctacaacgagatgtcac

SEQ ID NO: 14607 - DNA, 31 bp, Artificial Sequence
  Description of Artificial Sequence:  Nucleic Acid
  misc_feature: DNAzyme
aggagccgggctagctacaacgaccaaaatg

SEQ ID NO: 14608 - DNA, 31 bp, Artificial Sequence
  Description of Artificial Sequence:  Nucleic Acid
  misc_feature: DNAzyme
gctaggagggctagctacaacgacgtccaaa

SEQ ID NO: 14609 - DNA, 31 bp, Artificial Sequence
  Description of Artificial Sequence:  Nucleic Acid
  misc_feature: DNAzyme
tgtataggggctagctacaacgataggagcc

SEQ ID NO: 14610 - DNA, 31 bp, Artificial Sequence
  Description of Artificial Sequence:  Nucleic Acid
  misc_feature: DNAzyme
ctgctgtaggctagctacaacgaaggctagg

SEQ ID NO: 14611 - DNA, 31 bp, Artificial Sequence
  Description of Artificial Sequence:  Nucleic Acid
  misc_feature: DNAzyme
ccctgctgggctagctacaacgaataggcta

SEQ ID NO: 14612 - DNA, 31 bp, Artificial Sequence
  Description of Artificial Sequence:  Nucleic Acid
  misc_feature: DNAzyme
cacccctgggctagctacaacgatgtatagg

SEQ ID NO: 14613 - DNA, 31 bp, Artificial Sequence
  Description of Artificial Sequence:  Nucleic Acid
  misc_feature: DNAzyme
ggccaacaggctagctacaacgaccctgctg

SEQ ID NO: 14614 - DNA, 31 bp, Artificial Sequence
  Description of Artificial Sequence:  Nucleic Acid
  misc_feature: DNAzyme
cgggccaaggctagctacaacgaacccctgc

SEQ ID NO: 14615 - DNA, 31 bp, Artificial Sequence
  Description of Artificial Sequence:  Nucleic Acid
  misc_feature: DNAzyme
tacacgggggctagctacaacgacaacaccc

SEQ ID NO: 14616 - DNA, 31 bp, Artificial Sequence
  Description of Artificial Sequence:  Nucleic Acid
  misc_feature: DNAzyme
acgctacaggctagctacaacgagggccaac

SEQ ID NO: 14617 - DNA, 31 bp, Artificial Sequence
  Description of Artificial Sequence:  Nucleic Acid
  misc_feature: DNAzyme
ctacgctaggctagctacaacgaacgggcca

SEQ ID NO: 14618 - DNA, 31 bp, Artificial Sequence
  Description of Artificial Sequence:  Nucleic Acid
  misc_feature: DNAzyme
agcctacgggctagctacaacgatacacggg

SEQ ID NO: 14619 - DNA, 31 bp, Artificial Sequence
  Description of Artificial Sequence:  Nucleic Acid
  misc_feature: DNAzyme
aaagcctaggctagctacaacgagctacacg

SEQ ID NO: 14620 - DNA, 31 bp, Artificial Sequence
  Description of Artificial Sequence:  Nucleic Acid
  misc_feature: DNAzyme
ggctaaagggctagctacaacgactacgcta

SEQ ID NO: 14621 - DNA, 31 bp, Artificial Sequence
  Description of Artificial Sequence:  Nucleic Acid
  misc_feature: DNAzyme
tcacacggggctagctacaacgataaagcct

SEQ ID NO: 14622 - DNA, 31 bp, Artificial Sequence
  Description of Artificial Sequence:  Nucleic Acid
  misc_feature: DNAzyme
gtctcacaggctagctacaacgaggctaaag

SEQ ID NO: 14623 - DNA, 31 bp, Artificial Sequence
  Description of Artificial Sequence:  Nucleic Acid
  misc_feature: DNAzyme
gtgtctcaggctagctacaacgaacggctaa

SEQ ID NO: 14624 - DNA, 31 bp, Artificial Sequence
  Description of Artificial Sequence:  Nucleic Acid
  misc_feature: DNAzyme
tggaagtgggctagctacaacgactcacacg

SEQ ID NO: 14625 - DNA, 31 bp, Artificial Sequence
  Description of Artificial Sequence:  Nucleic Acid
  misc_feature: DNAzyme
tgtggaagggctagctacaacgagtctcaca

SEQ ID NO: 14626 - DNA, 31 bp, Artificial Sequence
  Description of Artificial Sequence:  Nucleic Acid
  misc_feature: DNAzyme
atcaaatgggctagctacaacgaggaagtgt

SEQ ID NO: 14627 - DNA, 31 bp, Artificial Sequence
  Description of Artificial Sequence:  Nucleic Acid
  misc_feature: DNAzyme
ggatcaaaggctagctacaacgagtggaagt

SEQ ID NO: 14628 - DNA, 31 bp, Artificial Sequence
  Description of Artificial Sequence:  Nucleic Acid
  misc_feature: DNAzyme
tcgtgggaggctagctacaacgacaaatgtg

SEQ ID NO: 14629 - DNA, 31 bp, Artificial Sequence
  Description of Artificial Sequence:  Nucleic Acid
  misc_feature: DNAzyme
ccccatcgggctagctacaacgagggatcaa

SEQ ID NO: 14630 - DNA, 31 bp, Artificial Sequence
  Description of Artificial Sequence:  Nucleic Acid
  misc_feature: DNAzyme
cacccccaggctagctacaacgacgtgggat

SEQ ID NO: 14631 - DNA, 31 bp, Artificial Sequence
  Description of Artificial Sequence:  Nucleic Acid
  misc_feature: DNAzyme
aggctccaggctagctacaacgaccccatcg

SEQ ID NO: 14632 - DNA, 31 bp, Artificial Sequence
  Description of Artificial Sequence:  Nucleic Acid
  misc_feature: DNAzyme
ggctcaggggctagctacaacgatccacccc

SEQ ID NO: 14633 - DNA, 31 bp, Artificial Sequence
  Description of Artificial Sequence:  Nucleic Acid
  misc_feature: DNAzyme
cgccagggggctagctacaacgatcaggctc

SEQ ID NO: 14634 - DNA, 31 bp, Artificial Sequence
  Description of Artificial Sequence:  Nucleic Acid
  misc_feature: DNAzyme
agtgtgcgggctagctacaacgacagggctc

SEQ ID NO: 14635 - DNA, 31 bp, Artificial Sequence
  Description of Artificial Sequence:  Nucleic Acid
  misc_feature: DNAzyme
acagtgtgggctagctacaacgagccagggc

SEQ ID NO: 14636 - DNA, 31 bp, Artificial Sequence
  Description of Artificial Sequence:  Nucleic Acid
  misc_feature: DNAzyme
ccacagtgggctagctacaacgagcgccagg

SEQ ID NO: 14637 - DNA, 31 bp, Artificial Sequence
  Description of Artificial Sequence:  Nucleic Acid
  misc_feature: DNAzyme
agccacagggctagctacaacgagtgcgcca

SEQ ID NO: 14638 - DNA, 31 bp, Artificial Sequence
  Description of Artificial Sequence:  Nucleic Acid
  misc_feature: DNAzyme
ccaagccaggctagctacaacgaagtgtgcg

SEQ ID NO: 14639 - DNA, 31 bp, Artificial Sequence
  Description of Artificial Sequence:  Nucleic Acid
  misc_feature: DNAzyme
ataccaagggctagctacaacgacacagtgt

SEQ ID NO: 14640 - DNA, 31 bp, Artificial Sequence
  Description of Artificial Sequence:  Nucleic Acid
  misc_feature: DNAzyme
gtagcataggctagctacaacgacaagccac

SEQ ID NO: 14641 - DNA, 31 bp, Artificial Sequence
  Description of Artificial Sequence:  Nucleic Acid
  misc_feature: DNAzyme
tggtagcaggctagctacaacgaaccaagcc

SEQ ID NO: 14642 - DNA, 31 bp, Artificial Sequence
  Description of Artificial Sequence:  Nucleic Acid
  misc_feature: DNAzyme
cctggtagggctagctacaacgaataccaag

SEQ ID NO: 14643 - DNA, 31 bp, Artificial Sequence
  Description of Artificial Sequence:  Nucleic Acid
  misc_feature: DNAzyme
ctacctggggctagctacaacgaagcatacc

SEQ ID NO: 14644 - DNA, 31 bp, Artificial Sequence
  Description of Artificial Sequence:  Nucleic Acid
  misc_feature: DNAzyme
ctcccctaggctagctacaacgactggtagc

SEQ ID NO: 14645 - DNA, 31 bp, Artificial Sequence
  Description of Artificial Sequence:  Nucleic Acid
  misc_feature: DNAzyme
ggagaaaaggctagctacaacgactccccta

SEQ ID NO: 14646 - DNA, 31 bp, Artificial Sequence
  Description of Artificial Sequence:  Nucleic Acid
  misc_feature: DNAzyme
caagcaggggctagctacaacgaaggagaaa

SEQ ID NO: 14647 - DNA, 31 bp, Artificial Sequence
  Description of Artificial Sequence:  Nucleic Acid
  misc_feature: DNAzyme
agaccaagggctagctacaacgaaggcagga

SEQ ID NO: 14648 - DNA, 31 bp, Artificial Sequence
  Description of Artificial Sequence:  Nucleic Acid
  misc_feature: DNAzyme
gtcccagaggctagctacaacgacaagcagg

SEQ ID NO: 14649 - DNA, 31 bp, Artificial Sequence
  Description of Artificial Sequence:  Nucleic Acid
  misc_feature: DNAzyme
acttcttgggctagctacaacgacccagacc

SEQ ID NO: 14650 - DNA, 31 bp, Artificial Sequence
  Description of Artificial Sequence:  Nucleic Acid
  misc_feature: DNAzyme
gatgcccaggctagctacaacgattcttgtc

SEQ ID NO: 14651 - DNA, 31 bp, Artificial Sequence
  Description of Artificial Sequence:  Nucleic Acid
  misc_feature: DNAzyme
catagatgggctagctacaacgaccacttct

SEQ ID NO: 14652 - DNA, 31 bp, Artificial Sequence
  Description of Artificial Sequence:  Nucleic Acid
  misc_feature: DNAzyme
cacatagaggctagctacaacgagcccactt

SEQ ID NO: 14653 - DNA, 31 bp, Artificial Sequence
  Description of Artificial Sequence:  Nucleic Acid
  misc_feature: DNAzyme
cacccacaggctagctacaacgaagatgccc

SEQ ID NO: 14654 - DNA, 31 bp, Artificial Sequence
  Description of Artificial Sequence:  Nucleic Acid
  misc_feature: DNAzyme
ctcacccaggctagctacaacgaatagatgc

SEQ ID NO: 14655 - DNA, 31 bp, Artificial Sequence
  Description of Artificial Sequence:  Nucleic Acid
  misc_feature: DNAzyme
aggcctcaggctagctacaacgaccacatag

SEQ ID NO: 14656 - DNA, 31 bp, Artificial Sequence
  Description of Artificial Sequence:  Nucleic Acid
  misc_feature: DNAzyme
ttcacaggggctagctacaacgactcaccca

SEQ ID NO: 14657 - DNA, 31 bp, Artificial Sequence
  Description of Artificial Sequence:  Nucleic Acid
  misc_feature: DNAzyme
tgtcttcaggctagctacaacgaaggcctca

SEQ ID NO: 14658 - DNA, 31 bp, Artificial Sequence
  Description of Artificial Sequence:  Nucleic Acid
  misc_feature: DNAzyme
ggagggtgggctagctacaacgacttcacag

SEQ ID NO: 14659 - DNA, 31 bp, Artificial Sequence
  Description of Artificial Sequence:  Nucleic Acid
  misc_feature: DNAzyme
tgggagggggctagctacaacgagtcttcac

SEQ ID NO: 14660 - DNA, 31 bp, Artificial Sequence
  Description of Artificial Sequence:  Nucleic Acid
  misc_feature: DNAzyme
atctggagggctagctacaacgatctgggag

SEQ ID NO: 14661 - DNA, 31 bp, Artificial Sequence
  Description of Artificial Sequence:  Nucleic Acid
  misc_feature: DNAzyme
caggaccaggctagctacaacgactggagtt

SEQ ID NO: 14662 - DNA, 31 bp, Artificial Sequence
  Description of Artificial Sequence:  Nucleic Acid
  misc_feature: DNAzyme
tgccaggaggctagctacaacgacatctgga

SEQ ID NO: 14663 - DNA, 31 bp, Artificial Sequence
  Description of Artificial Sequence:  Nucleic Acid
  misc_feature: DNAzyme
cccttctgggctagctacaacgacaggacca

SEQ ID NO: 14664 - DNA, 31 bp, Artificial Sequence
  Description of Artificial Sequence:  Nucleic Acid
  misc_feature: DNAzyme
cagggttgggctagctacaacgaccttctgc

SEQ ID NO: 14665 - DNA, 31 bp, Artificial Sequence
  Description of Artificial Sequence:  Nucleic Acid
  misc_feature: DNAzyme
caccagggggctagctacaacgatgcccttc

SEQ ID NO: 14666 - DNA, 31 bp, Artificial Sequence
  Description of Artificial Sequence:  Nucleic Acid
  misc_feature: DNAzyme
taaatacaggctagctacaacgacagggttg

SEQ ID NO: 14667 - DNA, 31 bp, Artificial Sequence
  Description of Artificial Sequence:  Nucleic Acid
  misc_feature: DNAzyme
cctaaataggctagctacaacgaaccagggt

SEQ ID NO: 14668 - DNA, 31 bp, Artificial Sequence
  Description of Artificial Sequence:  Nucleic Acid
  misc_feature: DNAzyme
tacctaaaggctagctacaacgaacaccagg

SEQ ID NO: 14669 - DNA, 31 bp, Artificial Sequence
  Description of Artificial Sequence:  Nucleic Acid
  misc_feature: DNAzyme
cgggcttaggctagctacaacgactaaatac

SEQ ID NO: 14670 - DNA, 31 bp, Artificial Sequence
  Description of Artificial Sequence:  Nucleic Acid
  misc_feature: DNAzyme
gttgcgggggctagctacaacgattacctaa

SEQ ID NO: 14671 - DNA, 31 bp, Artificial Sequence
  Description of Artificial Sequence:  Nucleic Acid
  misc_feature: DNAzyme
ttaggttgggctagctacaacgagggcttac

SEQ ID NO: 14672 - DNA, 31 bp, Artificial Sequence
  Description of Artificial Sequence:  Nucleic Acid
  misc_feature: DNAzyme
ccgttaggggctagctacaacgatgcgggct

SEQ ID NO: 14673 - DNA, 31 bp, Artificial Sequence
  Description of Artificial Sequence:  Nucleic Acid
  misc_feature: DNAzyme
gacctccgggctagctacaacgataggttgc

SEQ ID NO: 14674 - DNA, 31 bp, Artificial Sequence
  Description of Artificial Sequence:  Nucleic Acid
  misc_feature: DNAzyme
cgccgagaggctagctacaacgactccgtta

SEQ ID NO: 14675 - DNA, 31 bp, Artificial Sequence
  Description of Artificial Sequence:  Nucleic Acid
  misc_feature: DNAzyme
cacgcccgggctagctacaacgacgagacct

SEQ ID NO: 14676 - DNA, 31 bp, Artificial Sequence
  Description of Artificial Sequence:  Nucleic Acid
  misc_feature: DNAzyme
agctcacgggctagctacaacgaccgccgag

SEQ ID NO: 14677 - DNA, 31 bp, Artificial Sequence
  Description of Artificial Sequence:  Nucleic Acid
  misc_feature: DNAzyme
cgagctcaggctagctacaacgagcccgccg

SEQ ID NO: 14678 - DNA, 31 bp, Artificial Sequence
  Description of Artificial Sequence:  Nucleic Acid
  misc_feature: DNAzyme
ggtacgagggctagctacaacgatcacgccc

SEQ ID NO: 14679 - DNA, 31 bp, Artificial Sequence
  Description of Artificial Sequence:  Nucleic Acid
  misc_feature: DNAzyme
gcttggtaggctagctacaacgagagctcac

SEQ ID NO: 14680 - DNA, 31 bp, Artificial Sequence
  Description of Artificial Sequence:  Nucleic Acid
  misc_feature: DNAzyme
gtgcttggggctagctacaacgaacgagctc

SEQ ID NO: 14681 - DNA, 31 bp, Artificial Sequence
  Description of Artificial Sequence:  Nucleic Acid
  misc_feature: DNAzyme
gggatgtgggctagctacaacgattggtacg

SEQ ID NO: 14682 - DNA, 31 bp, Artificial Sequence
  Description of Artificial Sequence:  Nucleic Acid
  misc_feature: DNAzyme
gcgggatgggctagctacaacgagcttggta

SEQ ID NO: 14683 - DNA, 31 bp, Artificial Sequence
  Description of Artificial Sequence:  Nucleic Acid
  misc_feature: DNAzyme
acgcgggaggctagctacaacgagtgcttgg

SEQ ID NO: 14684 - DNA, 31 bp, Artificial Sequence
  Description of Artificial Sequence:  Nucleic Acid
  misc_feature: DNAzyme
ctatgacgggctagctacaacgagggatgtg

SEQ ID NO: 14685 - DNA, 31 bp, Artificial Sequence
  Description of Artificial Sequence:  Nucleic Acid
  misc_feature: DNAzyme
tgctatgaggctagctacaacgagcgggatg

SEQ ID NO: 14686 - DNA, 31 bp, Artificial Sequence
  Description of Artificial Sequence:  Nucleic Acid
  misc_feature: DNAzyme
gagtgctaggctagctacaacgagacgcggg

SEQ ID NO: 14687 - DNA, 31 bp, Artificial Sequence
  Description of Artificial Sequence:  Nucleic Acid
  misc_feature: DNAzyme
tgtgagtgggctagctacaacgatatgacgc

SEQ ID NO: 14688 - DNA, 31 bp, Artificial Sequence
  Description of Artificial Sequence:  Nucleic Acid
  misc_feature: DNAzyme
tgtgtgagggctagctacaacgagctatgac

SEQ ID NO: 14689 - DNA, 31 bp, Artificial Sequence
  Description of Artificial Sequence:  Nucleic Acid
  misc_feature: DNAzyme
gtcctgtgggctagctacaacgagagtgcta

SEQ ID NO: 14690 - DNA, 31 bp, Artificial Sequence
  Description of Artificial Sequence:  Nucleic Acid
  misc_feature: DNAzyme
cggtcctgggctagctacaacgagtgagtgc

SEQ ID NO: 14691 - DNA, 31 bp, Artificial Sequence
  Description of Artificial Sequence:  Nucleic Acid
  misc_feature: DNAzyme
ctcctcggggctagctacaacgacctgtgtg

SEQ ID NO: 14692 - DNA, 31 bp, Artificial Sequence
  Description of Artificial Sequence:  Nucleic Acid
  misc_feature: DNAzyme
atgttcgaggctagctacaacgatcctcggt

SEQ ID NO: 14693 - DNA, 31 bp, Artificial Sequence
  Description of Artificial Sequence:  Nucleic Acid
  misc_feature: DNAzyme
cgggcatgggctagctacaacgatcgactcc

SEQ ID NO: 14694 - DNA, 31 bp, Artificial Sequence
  Description of Artificial Sequence:  Nucleic Acid
  misc_feature: DNAzyme
ttcgggcaggctagctacaacgagttcgact

SEQ ID NO: 14695 - DNA, 31 bp, Artificial Sequence
  Description of Artificial Sequence:  Nucleic Acid
  misc_feature: DNAzyme
ccttcgggggctagctacaacgaatgttcga

SEQ ID NO: 14696 - DNA, 31 bp, Artificial Sequence
  Description of Artificial Sequence:  Nucleic Acid
  misc_feature: DNAzyme
gagagcggggctagctacaacgacttcgggc

SEQ ID NO: 14697 - DNA, 31 bp, Artificial Sequence
  Description of Artificial Sequence:  Nucleic Acid
  misc_feature: DNAzyme
caggagagggctagctacaacgaggccttcg

SEQ ID NO: 14698 - DNA, 31 bp, Artificial Sequence
  Description of Artificial Sequence:  Nucleic Acid
  misc_feature: DNAzyme
gtttgtgaggctagctacaacgatccaggag

SEQ ID NO: 14699 - DNA, 31 bp, Artificial Sequence
  Description of Artificial Sequence:  Nucleic Acid
  misc_feature: DNAzyme
caggtttgggctagctacaacgagactccag

SEQ ID NO: 14700 - DNA, 31 bp, Artificial Sequence
  Description of Artificial Sequence:  Nucleic Acid
  misc_feature: DNAzyme
tatacaggggctagctacaacgattgtgact

SEQ ID NO: 14701 - DNA, 31 bp, Artificial Sequence
  Description of Artificial Sequence:  Nucleic Acid
  misc_feature: DNAzyme
ggcatataggctagctacaacgaaggtttgt

SEQ ID NO: 14702 - DNA, 31 bp, Artificial Sequence
  Description of Artificial Sequence:  Nucleic Acid
  misc_feature: DNAzyme
gaggcataggctagctacaacgaacaggttt

SEQ ID NO: 14703 - DNA, 31 bp, Artificial Sequence
  Description of Artificial Sequence:  Nucleic Acid
  misc_feature: DNAzyme
gagaggcaggctagctacaacgaatacaggt

SEQ ID NO: 14704 - DNA, 31 bp, Artificial Sequence
  Description of Artificial Sequence:  Nucleic Acid
  misc_feature: DNAzyme
aggagaggggctagctacaacgaatatacag

SEQ ID NO: 14705 - DNA, 31 bp, Artificial Sequence
  Description of Artificial Sequence:  Nucleic Acid
  misc_feature: DNAzyme
ggtaggggggctagctacaacgaaggagagg

SEQ ID NO: 14706 - DNA, 31 bp, Artificial Sequence
  Description of Artificial Sequence:  Nucleic Acid
  misc_feature: DNAzyme
aggaccggggctagctacaacgaaggggcag

SEQ ID NO: 14707 - DNA, 31 bp, Artificial Sequence
  Description of Artificial Sequence:  Nucleic Acid
  misc_feature: DNAzyme
aggtaggaggctagctacaacgacggtaggg

SEQ ID NO: 14708 - DNA, 31 bp, Artificial Sequence
  Description of Artificial Sequence:  Nucleic Acid
  misc_feature: DNAzyme
aggcgaggggctagctacaacgaaggaccgg

SEQ ID NO: 14709 - DNA, 31 bp, Artificial Sequence
  Description of Artificial Sequence:  Nucleic Acid
  misc_feature: DNAzyme
cgcagaggggctagctacaacgagaggtagg

SEQ ID NO: 14710 - DNA, 31 bp, Artificial Sequence
  Description of Artificial Sequence:  Nucleic Acid
  misc_feature: DNAzyme
cccgctcgggctagctacaacgaagaggcga

SEQ ID NO: 14711 - DNA, 31 bp, Artificial Sequence
  Description of Artificial Sequence:  Nucleic Acid
  misc_feature: DNAzyme
gtgtcccgggctagctacaacgatcgcagag

SEQ ID NO: 14712 - DNA, 31 bp, Artificial Sequence
  Description of Artificial Sequence:  Nucleic Acid
  misc_feature: DNAzyme
acgcagtgggctagctacaacgacccgctcg

SEQ ID NO: 14713 - DNA, 31 bp, Artificial Sequence
  Description of Artificial Sequence:  Nucleic Acid
  misc_feature: DNAzyme
agacgcagggctagctacaacgagtcccgct

SEQ ID NO: 14714 - DNA, 31 bp, Artificial Sequence
  Description of Artificial Sequence:  Nucleic Acid
  misc_feature: DNAzyme
ccaagacgggctagctacaacgaagtgtccc

SEQ ID NO: 14715 - DNA, 31 bp, Artificial Sequence
  Description of Artificial Sequence:  Nucleic Acid
  misc_feature: DNAzyme
ccccaagaggctagctacaacgagcagtgtc

SEQ ID NO: 14716 - DNA, 31 bp, Artificial Sequence
  Description of Artificial Sequence:  Nucleic Acid
  misc_feature: DNAzyme
cgaccgtgggctagctacaacgacccaagac

SEQ ID NO: 14717 - DNA, 31 bp, Artificial Sequence
  Description of Artificial Sequence:  Nucleic Acid
  misc_feature: DNAzyme
gacgaccgggctagctacaacgagccccaag

SEQ ID NO: 14718 - DNA, 31 bp, Artificial Sequence
  Description of Artificial Sequence:  Nucleic Acid
  misc_feature: DNAzyme
gacgacgaggctagctacaacgacgtgcccc

SEQ ID NO: 14719 - DNA, 31 bp, Artificial Sequence
  Description of Artificial Sequence:  Nucleic Acid
  misc_feature: DNAzyme
tgagacgaggctagctacaacgagaccgtgc

SEQ ID NO: 14720 - DNA, 31 bp, Artificial Sequence
  Description of Artificial Sequence:  Nucleic Acid
  misc_feature: DNAzyme
cattgagaggctagctacaacgagacgaccg

SEQ ID NO: 14721 - DNA, 31 bp, Artificial Sequence
  Description of Artificial Sequence:  Nucleic Acid
  misc_feature: DNAzyme
cttcaccaggctagctacaacgatgagacga

SEQ ID NO: 14722 - DNA, 31 bp, Artificial Sequence
  Description of Artificial Sequence:  Nucleic Acid
  misc_feature: DNAzyme
taccttcaggctagctacaacgacattgaga

SEQ ID NO: 14723 - DNA, 31 bp, Artificial Sequence
  Description of Artificial Sequence:  Nucleic Acid
  misc_feature: DNAzyme
ggaccctaggctagctacaacgacttcacca

SEQ ID NO: 14724 - DNA, 31 bp, Artificial Sequence
  Description of Artificial Sequence:  Nucleic Acid
  misc_feature: DNAzyme
agcttggaggctagctacaacgacctacctt

SEQ ID NO: 14725 - DNA, 31 bp, Artificial Sequence
  Description of Artificial Sequence:  Nucleic Acid
  misc_feature: DNAzyme
gacttcagggctagctacaacgattggaccc

SEQ ID NO: 14726 - DNA, 31 bp, Artificial Sequence
  Description of Artificial Sequence:  Nucleic Acid
  misc_feature: DNAzyme
acagtcgaggctagctacaacgattcagctt

SEQ ID NO: 14727 - DNA, 31 bp, Artificial Sequence
  Description of Artificial Sequence:  Nucleic Acid
  misc_feature: DNAzyme
ccaaacagggctagctacaacgacgacttca

SEQ ID NO: 14728 - DNA, 31 bp, Artificial Sequence
  Description of Artificial Sequence:  Nucleic Acid
  misc_feature: DNAzyme
cacccaaaggctagctacaacgaagtcgact

SEQ ID NO: 14729 - DNA, 31 bp, Artificial Sequence
  Description of Artificial Sequence:  Nucleic Acid
  misc_feature: DNAzyme
atgtgtcaggctagctacaacgaccaaacag

SEQ ID NO: 14730 - DNA, 31 bp, Artificial Sequence
  Description of Artificial Sequence:  Nucleic Acid
  misc_feature: DNAzyme
tacatgtgggctagctacaacgacacccaaa

SEQ ID NO: 14731 - DNA, 31 bp, Artificial Sequence
  Description of Artificial Sequence:  Nucleic Acid
  misc_feature: DNAzyme
aatacatgggctagctacaacgagtcaccca

SEQ ID NO: 14732 - DNA, 31 bp, Artificial Sequence
  Description of Artificial Sequence:  Nucleic Acid
  misc_feature: DNAzyme
gtaatacaggctagctacaacgagtgtcacc

SEQ ID NO: 14733 - DNA, 31 bp, Artificial Sequence
  Description of Artificial Sequence:  Nucleic Acid
  misc_feature: DNAzyme
ctgtaataggctagctacaacgaatgtgtca

SEQ ID NO: 14734 - DNA, 31 bp, Artificial Sequence
  Description of Artificial Sequence:  Nucleic Acid
  misc_feature: DNAzyme
gactgtaaggctagctacaacgaacatgtgt

SEQ ID NO: 14735 - DNA, 31 bp, Artificial Sequence
  Description of Artificial Sequence:  Nucleic Acid
  misc_feature: DNAzyme
atcgactgggctagctacaacgaaatacatg

SEQ ID NO: 14736 - DNA, 31 bp, Artificial Sequence
  Description of Artificial Sequence:  Nucleic Acid
  misc_feature: DNAzyme
gtgatcgaggctagctacaacgatgtaatac

SEQ ID NO: 14737 - DNA, 31 bp, Artificial Sequence
  Description of Artificial Sequence:  Nucleic Acid
  misc_feature: DNAzyme
ctcggtgaggctagctacaacgacgactgta

SEQ ID NO: 14738 - DNA, 31 bp, Artificial Sequence
  Description of Artificial Sequence:  Nucleic Acid
  misc_feature: DNAzyme
tgactcggggctagctacaacgagatcgact

SEQ ID NO: 14739 - DNA, 31 bp, Artificial Sequence
  Description of Artificial Sequence:  Nucleic Acid
  misc_feature: DNAzyme
gattttgaggctagctacaacgatcggtgat

SEQ ID NO: 14740 - DNA, 31 bp, Artificial Sequence
  Description of Artificial Sequence:  Nucleic Acid
  misc_feature: DNAzyme
accggcgaggctagctacaacgatttgactc

SEQ ID NO: 14741 - DNA, 31 bp, Artificial Sequence
  Description of Artificial Sequence:  Nucleic Acid
  misc_feature: DNAzyme
tataccggggctagctacaacgagattttga

SEQ ID NO: 14742 - DNA, 31 bp, Artificial Sequence
  Description of Artificial Sequence:  Nucleic Acid
  misc_feature: DNAzyme
gggctataggctagctacaacgacggcgatt

SEQ ID NO: 14743 - DNA, 31 bp, Artificial Sequence
  Description of Artificial Sequence:  Nucleic Acid
  misc_feature: DNAzyme
acgggctaggctagctacaacgaaccggcga

SEQ ID NO: 14744 - DNA, 31 bp, Artificial Sequence
  Description of Artificial Sequence:  Nucleic Acid
  misc_feature: DNAzyme
atgacgggggctagctacaacgatataccgg

SEQ ID NO: 14745 - DNA, 31 bp, Artificial Sequence
  Description of Artificial Sequence:  Nucleic Acid
  misc_feature: DNAzyme
tctaatgaggctagctacaacgagggctata

SEQ ID NO: 14746 - DNA, 31 bp, Artificial Sequence
  Description of Artificial Sequence:  Nucleic Acid
  misc_feature: DNAzyme
cgctctaaggctagctacaacgagacgggct

SEQ ID NO: 14747 - DNA, 31 bp, Artificial Sequence
  Description of Artificial Sequence:  Nucleic Acid
  misc_feature: DNAzyme
aacagacgggctagctacaacgatctaatga

SEQ ID NO: 14748 - DNA, 31 bp, Artificial Sequence
  Description of Artificial Sequence:  Nucleic Acid
  misc_feature: DNAzyme
gcaacagaggctagctacaacgagctctaat

SEQ ID NO: 14749 - DNA, 31 bp, Artificial Sequence
  Description of Artificial Sequence:  Nucleic Acid
  misc_feature: DNAzyme
cgtggcaaggctagctacaacgaagacgctc

SEQ ID NO: 14750 - DNA, 31 bp, Artificial Sequence
  Description of Artificial Sequence:  Nucleic Acid
  misc_feature: DNAzyme
tgtcgtggggctagctacaacgaaacagacg

SEQ ID NO: 14751 - DNA, 31 bp, Artificial Sequence
  Description of Artificial Sequence:  Nucleic Acid
  misc_feature: DNAzyme
cgttgtcgggctagctacaacgaggcaacag

SEQ ID NO: 14752 - DNA, 31 bp, Artificial Sequence
  Description of Artificial Sequence:  Nucleic Acid
  misc_feature: DNAzyme
cgtcgttgggctagctacaacgacgtggcaa

SEQ ID NO: 14753 - DNA, 31 bp, Artificial Sequence
  Description of Artificial Sequence:  Nucleic Acid
  misc_feature: DNAzyme
ggacgtcgggctagctacaacgatgtcgtgg

SEQ ID NO: 14754 - DNA, 31 bp, Artificial Sequence
  Description of Artificial Sequence:  Nucleic Acid
  misc_feature: DNAzyme
cggggacgggctagctacaacgacgttgtcg

SEQ ID NO: 14755 - DNA, 31 bp, Artificial Sequence
  Description of Artificial Sequence:  Nucleic Acid
  misc_feature: DNAzyme
agcggggaggctagctacaacgagtcgttgt

SEQ ID NO: 14756 - DNA, 31 bp, Artificial Sequence
  Description of Artificial Sequence:  Nucleic Acid
  misc_feature: DNAzyme
ccggccagggctagctacaacgaggggacgt

SEQ ID NO: 14757 - DNA, 31 bp, Artificial Sequence
  Description of Artificial Sequence:  Nucleic Acid
  misc_feature: DNAzyme
cataccggggctagctacaacgacagcgggg

SEQ ID NO: 14758 - DNA, 31 bp, Artificial Sequence
  Description of Artificial Sequence:  Nucleic Acid
  misc_feature: DNAzyme
ccgtcataggctagctacaacgacggccagc

SEQ ID NO: 14759 - DNA, 31 bp, Artificial Sequence
  Description of Artificial Sequence:  Nucleic Acid
  misc_feature: DNAzyme
gtccgtcaggctagctacaacgaaccggcca

SEQ ID NO: 14760 - DNA, 31 bp, Artificial Sequence
  Description of Artificial Sequence:  Nucleic Acid
  misc_feature: DNAzyme
cgtgtccgggctagctacaacgacataccgg

SEQ ID NO: 14761 - DNA, 31 bp, Artificial Sequence
  Description of Artificial Sequence:  Nucleic Acid
  misc_feature: DNAzyme
tcgacgtgggctagctacaacgaccgtcata

SEQ ID NO: 14762 - DNA, 31 bp, Artificial Sequence
  Description of Artificial Sequence:  Nucleic Acid
  misc_feature: DNAzyme
tctcgacgggctagctacaacgagtccgtca

SEQ ID NO: 14763 - DNA, 31 bp, Artificial Sequence
  Description of Artificial Sequence:  Nucleic Acid
  misc_feature: DNAzyme
ggtctcgaggctagctacaacgagtgtccgt

SEQ ID NO: 14764 - DNA, 31 bp, Artificial Sequence
  Description of Artificial Sequence:  Nucleic Acid
  misc_feature: DNAzyme
taccggggggctagctacaacgactcgacgt

SEQ ID NO: 14765 - DNA, 31 bp, Artificial Sequence
  Description of Artificial Sequence:  Nucleic Acid
  misc_feature: DNAzyme
gcgtattaggctagctacaacgacggggtct

SEQ ID NO: 14766 - DNA, 31 bp, Artificial Sequence
  Description of Artificial Sequence:  Nucleic Acid
  misc_feature: DNAzyme
gtagcgtaggctagctacaacgataccgggg

SEQ ID NO: 14767 - DNA, 31 bp, Artificial Sequence
  Description of Artificial Sequence:  Nucleic Acid
  misc_feature: DNAzyme
ctgtagcgggctagctacaacgaattaccgg

SEQ ID NO: 14768 - DNA, 31 bp, Artificial Sequence
  Description of Artificial Sequence:  Nucleic Acid
  misc_feature: DNAzyme
cgctgtagggctagctacaacgagtattacc

SEQ ID NO: 14769 - DNA, 31 bp, Artificial Sequence
  Description of Artificial Sequence:  Nucleic Acid
  misc_feature: DNAzyme
taacgctgggctagctacaacgaagcgtatt

SEQ ID NO: 14770 - DNA, 31 bp, Artificial Sequence
  Description of Artificial Sequence:  Nucleic Acid
  misc_feature: DNAzyme
acttaacgggctagctacaacgatgtagcgt

SEQ ID NO: 14771 - DNA, 31 bp, Artificial Sequence
  Description of Artificial Sequence:  Nucleic Acid
  misc_feature: DNAzyme
ggacttaaggctagctacaacgagctgtagc

SEQ ID NO: 14772 - DNA, 31 bp, Artificial Sequence
  Description of Artificial Sequence:  Nucleic Acid
  misc_feature: DNAzyme
gcctcggaggctagctacaacgattaacgct

SEQ ID NO: 14773 - DNA, 31 bp, Artificial Sequence
  Description of Artificial Sequence:  Nucleic Acid
  misc_feature: DNAzyme
ctgtcgggggctagctacaacgactcggact

SEQ ID NO: 14774 - DNA, 31 bp, Artificial Sequence
  Description of Artificial Sequence:  Nucleic Acid
  misc_feature: DNAzyme
caaagctgggctagctacaacgacgggcctc

SEQ ID NO: 14775 - DNA, 31 bp, Artificial Sequence
  Description of Artificial Sequence:  Nucleic Acid
  misc_feature: DNAzyme
ctgcaaagggctagctacaacgatgtcgggc

SEQ ID NO: 14776 - DNA, 31 bp, Artificial Sequence
  Description of Artificial Sequence:  Nucleic Acid
  misc_feature: DNAzyme
gctcgctgggctagctacaacgaaaagctgt

SEQ ID NO: 14777 - DNA, 31 bp, Artificial Sequence
  Description of Artificial Sequence:  Nucleic Acid
  misc_feature: DNAzyme
cgagctcgggctagctacaacgatgcaaagc

SEQ ID NO: 14778 - DNA, 31 bp, Artificial Sequence
  Description of Artificial Sequence:  Nucleic Acid
  misc_feature: DNAzyme
gtgacgagggctagctacaacgatcgctgca

SEQ ID NO: 14779 - DNA, 31 bp, Artificial Sequence
  Description of Artificial Sequence:  Nucleic Acid
  misc_feature: DNAzyme
aaatgtgaggctagctacaacgagagctcgc

SEQ ID NO: 14780 - DNA, 31 bp, Artificial Sequence
  Description of Artificial Sequence:  Nucleic Acid
  misc_feature: DNAzyme
aagaaatgggctagctacaacgagacgagct

SEQ ID NO: 14781 - DNA, 31 bp, Artificial Sequence
  Description of Artificial Sequence:  Nucleic Acid
  misc_feature: DNAzyme
agaagaaaggctagctacaacgagtgacgag

SEQ ID NO: 14782 - DNA, 31 bp, Artificial Sequence
  Description of Artificial Sequence:  Nucleic Acid
  misc_feature: DNAzyme
ttctgccaggctagctacaacgatccaagaa

SEQ ID NO: 14783 - DNA, 31 bp, Artificial Sequence
  Description of Artificial Sequence:  Nucleic Acid
  misc_feature: DNAzyme
atcttctgggctagctacaacgacattccaa

SEQ ID NO: 14784 - DNA, 31 bp, Artificial Sequence
  Description of Artificial Sequence:  Nucleic Acid
  misc_feature: DNAzyme
gcatctcaggctagctacaacgacttctgcc

SEQ ID NO: 14785 - DNA, 31 bp, Artificial Sequence
  Description of Artificial Sequence:  Nucleic Acid
  misc_feature: DNAzyme
gggaggcaggctagctacaacgactcatctt

SEQ ID NO: 14786 - DNA, 31 bp, Artificial Sequence
  Description of Artificial Sequence:  Nucleic Acid
  misc_feature: DNAzyme
gggggaggggctagctacaacgaatctcatc

SEQ ID NO: 14787 - DNA, 31 bp, Artificial Sequence
  Description of Artificial Sequence:  Nucleic Acid
  misc_feature: DNAzyme
cgagaccaggctagctacaacgacaaagggg

SEQ ID NO: 14788 - DNA, 31 bp, Artificial Sequence
  Description of Artificial Sequence:  Nucleic Acid
  misc_feature: DNAzyme
catcgagaggctagctacaacgacatcaaag

SEQ ID NO: 14789 - DNA, 31 bp, Artificial Sequence
  Description of Artificial Sequence:  Nucleic Acid
  misc_feature: DNAzyme
catccccaggctagctacaacgacgagacca

SEQ ID NO: 14790 - DNA, 31 bp, Artificial Sequence
  Description of Artificial Sequence:  Nucleic Acid
  misc_feature: DNAzyme
caaagccaggctagctacaacgaccccatcg

SEQ ID NO: 14791 - DNA, 31 bp, Artificial Sequence
  Description of Artificial Sequence:  Nucleic Acid
  misc_feature: DNAzyme
tggcaaagggctagctacaacgacatcccca

SEQ ID NO: 14792 - DNA, 31 bp, Artificial Sequence
  Description of Artificial Sequence:  Nucleic Acid
  misc_feature: DNAzyme
ttctatggggctagctacaacgaaaagccat

SEQ ID NO: 14793 - DNA, 31 bp, Artificial Sequence
  Description of Artificial Sequence:  Nucleic Acid
  misc_feature: DNAzyme
cccttctaggctagctacaacgaggcaaagc

SEQ ID NO: 14794 - DNA, 31 bp, Artificial Sequence
  Description of Artificial Sequence:  Nucleic Acid
  misc_feature: DNAzyme
cggagagaggctagctacaacgaccccttct

SEQ ID NO: 14795 - DNA, 31 bp, Artificial Sequence
  Description of Artificial Sequence:  Nucleic Acid
  misc_feature: DNAzyme
gtccaacaggctagctacaacgacggagaga

SEQ ID NO: 14796 - DNA, 31 bp, Artificial Sequence
  Description of Artificial Sequence:  Nucleic Acid
  misc_feature: DNAzyme
ttgtccaaggctagctacaacgaaccggaga

SEQ ID NO: 14797 - DNA, 31 bp, Artificial Sequence
  Description of Artificial Sequence:  Nucleic Acid
  misc_feature: DNAzyme
tagccttgggctagctacaacgaccaacacc

SEQ ID NO: 14798 - DNA, 31 bp, Artificial Sequence
  Description of Artificial Sequence:  Nucleic Acid
  misc_feature: DNAzyme
ggagatagggctagctacaacgacttgtcca

SEQ ID NO: 14799 - DNA, 31 bp, Artificial Sequence
  Description of Artificial Sequence:  Nucleic Acid
  misc_feature: DNAzyme
cgaggagaggctagctacaacgaagccttgt

SEQ ID NO: 14800 - DNA, 31 bp, Artificial Sequence
  Description of Artificial Sequence:  Nucleic Acid
  misc_feature: DNAzyme
tcccaacaggctagctacaacgacgaggaga

SEQ ID NO: 14801 - DNA, 31 bp, Artificial Sequence
  Description of Artificial Sequence:  Nucleic Acid
  misc_feature: DNAzyme
catcccaaggctagctacaacgaatcgagga

SEQ ID NO: 14802 - DNA, 31 bp, Artificial Sequence
  Description of Artificial Sequence:  Nucleic Acid
  misc_feature: DNAzyme
gtgccacaggctagctacaacgacccaacat

SEQ ID NO: 14803 - DNA, 31 bp, Artificial Sequence
  Description of Artificial Sequence:  Nucleic Acid
  misc_feature: DNAzyme
ccgtgccaggctagctacaacgaatcccaac

SEQ ID NO: 14804 - DNA, 31 bp, Artificial Sequence
  Description of Artificial Sequence:  Nucleic Acid
  misc_feature: DNAzyme
tcaccgtgggctagctacaacgacacatccc

SEQ ID NO: 14805 - DNA, 31 bp, Artificial Sequence
  Description of Artificial Sequence:  Nucleic Acid
  misc_feature: DNAzyme
ggtcaccgggctagctacaacgagccacatc

SEQ ID NO: 14806 - DNA, 31 bp, Artificial Sequence
  Description of Artificial Sequence:  Nucleic Acid
  misc_feature: DNAzyme
atcggtcaggctagctacaacgacgtgccac

SEQ ID NO: 14807 - DNA, 31 bp, Artificial Sequence
  Description of Artificial Sequence:  Nucleic Acid
  misc_feature: DNAzyme
gggatcggggctagctacaacgacaccgtgc

SEQ ID NO: 14808 - DNA, 31 bp, Artificial Sequence
  Description of Artificial Sequence:  Nucleic Acid
  misc_feature: DNAzyme
ctccgggaggctagctacaacgacggtcacc

SEQ ID NO: 14809 - DNA, 31 bp, Artificial Sequence
  Description of Artificial Sequence:  Nucleic Acid
  misc_feature: DNAzyme
ccgctacgggctagctacaacgactccggga

SEQ ID NO: 14810 - DNA, 31 bp, Artificial Sequence
  Description of Artificial Sequence:  Nucleic Acid
  misc_feature: DNAzyme
caccgctaggctagctacaacgagcctccgg

SEQ ID NO: 14811 - DNA, 31 bp, Artificial Sequence
  Description of Artificial Sequence:  Nucleic Acid
  misc_feature: DNAzyme
cgccaccgggctagctacaacgatacgcctc

SEQ ID NO: 14812 - DNA, 31 bp, Artificial Sequence
  Description of Artificial Sequence:  Nucleic Acid
  misc_feature: DNAzyme
gctcgccaggctagctacaacgacgctacgc

SEQ ID NO: 14813 - DNA, 31 bp, Artificial Sequence
  Description of Artificial Sequence:  Nucleic Acid
  misc_feature: DNAzyme
cgtgctcgggctagctacaacgacaccgcta

SEQ ID NO: 14814 - DNA, 31 bp, Artificial Sequence
  Description of Artificial Sequence:  Nucleic Acid
  misc_feature: DNAzyme
tcgtcgtgggctagctacaacgatcgccacc

SEQ ID NO: 14815 - DNA, 31 bp, Artificial Sequence
  Description of Artificial Sequence:  Nucleic Acid
  misc_feature: DNAzyme
gctcgtcgggctagctacaacgagctcgcca

SEQ ID NO: 14816 - DNA, 31 bp, Artificial Sequence
  Description of Artificial Sequence:  Nucleic Acid
  misc_feature: DNAzyme
gcggctcgggctagctacaacgacgtgctcg

SEQ ID NO: 14817 - DNA, 31 bp, Artificial Sequence
  Description of Artificial Sequence:  Nucleic Acid
  misc_feature: DNAzyme
gagcgcggggctagctacaacgatcgtcgtg

SEQ ID NO: 14818 - DNA, 31 bp, Artificial Sequence
  Description of Artificial Sequence:  Nucleic Acid
  misc_feature: DNAzyme
ctggagcgggctagctacaacgaggctcgtc

SEQ ID NO: 14819 - DNA, 31 bp, Artificial Sequence
  Description of Artificial Sequence:  Nucleic Acid
  misc_feature: DNAzyme
ggctggagggctagctacaacgagcggctcg

SEQ ID NO: 14820 - DNA, 31 bp, Artificial Sequence
  Description of Artificial Sequence:  Nucleic Acid
  misc_feature: DNAzyme
ggagacggggctagctacaacgatggagcgc

SEQ ID NO: 14821 - DNA, 31 bp, Artificial Sequence
  Description of Artificial Sequence:  Nucleic Acid
  misc_feature: DNAzyme
agcggagaggctagctacaacgaggctggag

SEQ ID NO: 14822 - DNA, 31 bp, Artificial Sequence
  Description of Artificial Sequence:  Nucleic Acid
  misc_feature: DNAzyme
ggaccaagggctagctacaacgaggagacgg

SEQ ID NO: 14823 - DNA, 31 bp, Artificial Sequence
  Description of Artificial Sequence:  Nucleic Acid
  misc_feature: DNAzyme
gtcctggaggctagctacaacgacaagcgga

SEQ ID NO: 14824 - DNA, 31 bp, Artificial Sequence
  Description of Artificial Sequence:  Nucleic Acid
  misc_feature: DNAzyme
cggcacagggctagctacaacgacctggacc

SEQ ID NO: 14825 - DNA, 31 bp, Artificial Sequence
  Description of Artificial Sequence:  Nucleic Acid
  misc_feature: DNAzyme
catcggcaggctagctacaacgaagtcctgg

SEQ ID NO: 14826 - DNA, 31 bp, Artificial Sequence
  Description of Artificial Sequence:  Nucleic Acid
  misc_feature: DNAzyme
ggcatcggggctagctacaacgaacagtcct

SEQ ID NO: 14827 - DNA, 31 bp, Artificial Sequence
  Description of Artificial Sequence:  Nucleic Acid
  misc_feature: DNAzyme
tttgggcaggctagctacaacgacggcacag

SEQ ID NO: 14828 - DNA, 31 bp, Artificial Sequence
  Description of Artificial Sequence:  Nucleic Acid
  misc_feature: DNAzyme
attttgggggctagctacaacgaatcggcac

SEQ ID NO: 14829 - DNA, 31 bp, Artificial Sequence
  Description of Artificial Sequence:  Nucleic Acid
  misc_feature: DNAzyme
gacttccaggctagctacaacgatttgggca

SEQ ID NO: 14830 - DNA, 31 bp, Artificial Sequence
  Description of Artificial Sequence:  Nucleic Acid
  misc_feature: DNAzyme
tgactcgaggctagctacaacgattccattt

SEQ ID NO: 14831 - DNA, 31 bp, Artificial Sequence
  Description of Artificial Sequence:  Nucleic Acid
  misc_feature: DNAzyme
tcaattgaggctagctacaacgatcgacttc

SEQ ID NO: 14832 - DNA, 31 bp, Artificial Sequence
  Description of Artificial Sequence:  Nucleic Acid
  misc_feature: DNAzyme
ccactcaaggctagctacaacgatgactcga

SEQ ID NO: 14833 - DNA, 31 bp, Artificial Sequence
  Description of Artificial Sequence:  Nucleic Acid
  misc_feature: DNAzyme
gagtgccaggctagctacaacgatcaattga

SEQ ID NO: 14834 - DNA, 31 bp, Artificial Sequence
  Description of Artificial Sequence:  Nucleic Acid
  misc_feature: DNAzyme
gatgagtgggctagctacaacgacactcaat

SEQ ID NO: 14835 - DNA, 31 bp, Artificial Sequence
  Description of Artificial Sequence:  Nucleic Acid
  misc_feature: DNAzyme
gtgatgagggctagctacaacgagccactca

SEQ ID NO: 14836 - DNA, 31 bp, Artificial Sequence
  Description of Artificial Sequence:  Nucleic Acid
  misc_feature: DNAzyme
atgtgtgaggctagctacaacgagagtgcca

SEQ ID NO: 14837 - DNA, 31 bp, Artificial Sequence
  Description of Artificial Sequence:  Nucleic Acid
  misc_feature: DNAzyme
ataatgtgggctagctacaacgagatgagtg

SEQ ID NO: 14838 - DNA, 31 bp, Artificial Sequence
  Description of Artificial Sequence:  Nucleic Acid
  misc_feature: DNAzyme
tcataatgggctagctacaacgagtgatgag

SEQ ID NO: 14839 - DNA, 31 bp, Artificial Sequence
  Description of Artificial Sequence:  Nucleic Acid
  misc_feature: DNAzyme
catcataaggctagctacaacgagtgtgatg

SEQ ID NO: 14840 - DNA, 31 bp, Artificial Sequence
  Description of Artificial Sequence:  Nucleic Acid
  misc_feature: DNAzyme
tgacatcaggctagctacaacgaaatgtgtg

SEQ ID NO: 14841 - DNA, 31 bp, Artificial Sequence
  Description of Artificial Sequence:  Nucleic Acid
  misc_feature: DNAzyme
ctatgacaggctagctacaacgacataatgt

SEQ ID NO: 14842 - DNA, 31 bp, Artificial Sequence
  Description of Artificial Sequence:  Nucleic Acid
  misc_feature: DNAzyme
gcctatgaggctagctacaacgaatcataat

SEQ ID NO: 14843 - DNA, 31 bp, Artificial Sequence
  Description of Artificial Sequence:  Nucleic Acid
  misc_feature: DNAzyme
ggcgcctaggctagctacaacgagacatcat

SEQ ID NO: 14844 - DNA, 31 bp, Artificial Sequence
  Description of Artificial Sequence:  Nucleic Acid
  misc_feature: DNAzyme
tgggggcgggctagctacaacgactatgaca

SEQ ID NO: 14845 - DNA, 31 bp, Artificial Sequence
  Description of Artificial Sequence:  Nucleic Acid
  misc_feature: DNAzyme
tctgggggggctagctacaacgagcctatga

SEQ ID NO: 14846 - DNA, 31 bp, Artificial Sequence
  Description of Artificial Sequence:  Nucleic Acid
  misc_feature: DNAzyme
ggtggttgggctagctacaacgatctggggg

SEQ ID NO: 14847 - DNA, 31 bp, Artificial Sequence
  Description of Artificial Sequence:  Nucleic Acid
  misc_feature: DNAzyme
gacggtggggctagctacaacgatgctctgg

SEQ ID NO: 14848 - DNA, 31 bp, Artificial Sequence
  Description of Artificial Sequence:  Nucleic Acid
  misc_feature: DNAzyme
gccgacggggctagctacaacgaggttgctc

SEQ ID NO: 14849 - DNA, 31 bp, Artificial Sequence
  Description of Artificial Sequence:  Nucleic Acid
  misc_feature: DNAzyme
cttgccgaggctagctacaacgaggtggttg

SEQ ID NO: 14850 - DNA, 31 bp, Artificial Sequence
  Description of Artificial Sequence:  Nucleic Acid
  misc_feature: DNAzyme
gttccttgggctagctacaacgacgacggtg

SEQ ID NO: 14851 - DNA, 31 bp, Artificial Sequence
  Description of Artificial Sequence:  Nucleic Acid
  misc_feature: DNAzyme
atggcaagggctagctacaacgatccttgcc

SEQ ID NO: 14852 - DNA, 31 bp, Artificial Sequence
  Description of Artificial Sequence:  Nucleic Acid
  misc_feature: DNAzyme
acctatggggctagctacaacgaaagttcct

SEQ ID NO: 14853 - DNA, 31 bp, Artificial Sequence
  Description of Artificial Sequence:  Nucleic Acid
  misc_feature: DNAzyme
tccacctaggctagctacaacgaggcaagtt

SEQ ID NO: 14854 - DNA, 31 bp, Artificial Sequence
  Description of Artificial Sequence:  Nucleic Acid
  misc_feature: DNAzyme
gtactccaggctagctacaacgactatggca

SEQ ID NO: 14855 - DNA, 31 bp, Artificial Sequence
  Description of Artificial Sequence:  Nucleic Acid
  misc_feature: DNAzyme
atcacgtaggctagctacaacgatccaccta

SEQ ID NO: 14856 - DNA, 31 bp, Artificial Sequence
  Description of Artificial Sequence:  Nucleic Acid
  misc_feature: DNAzyme
ccatcacgggctagctacaacgaactccacc

SEQ ID NO: 14857 - DNA, 31 bp, Artificial Sequence
  Description of Artificial Sequence:  Nucleic Acid
  misc_feature: DNAzyme
ccccatcaggctagctacaacgagtactcca

SEQ ID NO: 14858 - DNA, 31 bp, Artificial Sequence
  Description of Artificial Sequence:  Nucleic Acid
  misc_feature: DNAzyme
cgcccccaggctagctacaacgacacgtact

SEQ ID NO: 14859 - DNA, 31 bp, Artificial Sequence
  Description of Artificial Sequence:  Nucleic Acid
  misc_feature: DNAzyme
cacgggcgggctagctacaacgaccccatca

SEQ ID NO: 14860 - DNA, 31 bp, Artificial Sequence
  Description of Artificial Sequence:  Nucleic Acid
  misc_feature: DNAzyme
accacgggggctagctacaacgagcccccat

SEQ ID NO: 14861 - DNA, 31 bp, Artificial Sequence
  Description of Artificial Sequence:  Nucleic Acid
  misc_feature: DNAzyme
catcaccaggctagctacaacgagggcgccc

SEQ ID NO: 14862 - DNA, 31 bp, Artificial Sequence
  Description of Artificial Sequence:  Nucleic Acid
  misc_feature: DNAzyme
gaccatcaggctagctacaacgacacgggcg

SEQ ID NO: 14863 - DNA, 31 bp, Artificial Sequence
  Description of Artificial Sequence:  Nucleic Acid
  misc_feature: DNAzyme
aaggaccaggctagctacaacgacaccacgg

SEQ ID NO: 14864 - DNA, 31 bp, Artificial Sequence
  Description of Artificial Sequence:  Nucleic Acid
  misc_feature: DNAzyme
ggtaaggaggctagctacaacgacatcacca

SEQ ID NO: 14865 - DNA, 31 bp, Artificial Sequence
  Description of Artificial Sequence:  Nucleic Acid
  misc_feature: DNAzyme
aactggggggctagctacaacgaaaggacca

SEQ ID NO: 14866 - DNA, 31 bp, Artificial Sequence
  Description of Artificial Sequence:  Nucleic Acid
  misc_feature: DNAzyme
catcagaaggctagctacaacgatggggtaa

SEQ ID NO: 14867 - DNA, 31 bp, Artificial Sequence
  Description of Artificial Sequence:  Nucleic Acid
  misc_feature: DNAzyme
tcctaacaggctagctacaacgacagaactg

SEQ ID NO: 14868 - DNA, 31 bp, Artificial Sequence
  Description of Artificial Sequence:  Nucleic Acid
  misc_feature: DNAzyme
gatcctaaggctagctacaacgaatcagaac

SEQ ID NO: 14869 - DNA, 31 bp, Artificial Sequence
  Description of Artificial Sequence:  Nucleic Acid
  misc_feature: DNAzyme
ggtgtcgaggctagctacaacgacctaacat

SEQ ID NO: 14870 - DNA, 31 bp, Artificial Sequence
  Description of Artificial Sequence:  Nucleic Acid
  misc_feature: DNAzyme
acacggtgggctagctacaacgacgatccta

SEQ ID NO: 14871 - DNA, 31 bp, Artificial Sequence
  Description of Artificial Sequence:  Nucleic Acid
  misc_feature: DNAzyme
gcacacggggctagctacaacgagtcgatcc

SEQ ID NO: 14872 - DNA, 31 bp, Artificial Sequence
  Description of Artificial Sequence:  Nucleic Acid
  misc_feature: DNAzyme
aaggcacaggctagctacaacgaggtgtcga

SEQ ID NO: 14873 - DNA, 31 bp, Artificial Sequence
  Description of Artificial Sequence:  Nucleic Acid
  misc_feature: DNAzyme
ctaaggcaggctagctacaacgaacggtgtc

SEQ ID NO: 14874 - DNA, 31 bp, Artificial Sequence
  Description of Artificial Sequence:  Nucleic Acid
  misc_feature: DNAzyme
gtctaaggggctagctacaacgaacacggtg

SEQ ID NO: 14875 - DNA, 31 bp, Artificial Sequence
  Description of Artificial Sequence:  Nucleic Acid
  misc_feature: DNAzyme
cgtatatgggctagctacaacgactaaggca

SEQ ID NO: 14876 - DNA, 31 bp, Artificial Sequence
  Description of Artificial Sequence:  Nucleic Acid
  misc_feature: DNAzyme
ggcgtataggctagctacaacgagtctaagg

SEQ ID NO: 14877 - DNA, 31 bp, Artificial Sequence
  Description of Artificial Sequence:  Nucleic Acid
  misc_feature: DNAzyme
ggggcgtaggctagctacaacgaatgtctaa

SEQ ID NO: 14878 - DNA, 31 bp, Artificial Sequence
  Description of Artificial Sequence:  Nucleic Acid
  misc_feature: DNAzyme
ttggggcgggctagctacaacgaatatgtct

SEQ ID NO: 14879 - DNA, 31 bp, Artificial Sequence
  Description of Artificial Sequence:  Nucleic Acid
  misc_feature: DNAzyme
gtttggggggctagctacaacgagtatatgt

SEQ ID NO: 14880 - DNA, 31 bp, Artificial Sequence
  Description of Artificial Sequence:  Nucleic Acid
  misc_feature: DNAzyme
ccttagggggctagctacaacgattggggcg

SEQ ID NO: 14881 - DNA, 31 bp, Artificial Sequence
  Description of Artificial Sequence:  Nucleic Acid
  misc_feature: DNAzyme
taccgccaggctagctacaacgacttagggt

SEQ ID NO: 14882 - DNA, 31 bp, Artificial Sequence
  Description of Artificial Sequence:  Nucleic Acid
  misc_feature: DNAzyme
cgttaccgggctagctacaacgacaccttag

SEQ ID NO: 14883 - DNA, 31 bp, Artificial Sequence
  Description of Artificial Sequence:  Nucleic Acid
  misc_feature: DNAzyme
gtccgttaggctagctacaacgacgccacct

SEQ ID NO: 14884 - DNA, 31 bp, Artificial Sequence
  Description of Artificial Sequence:  Nucleic Acid
  misc_feature: DNAzyme
tccgtccgggctagctacaacgataccgcca

SEQ ID NO: 14885 - DNA, 31 bp, Artificial Sequence
  Description of Artificial Sequence:  Nucleic Acid
  misc_feature: DNAzyme
taaatccgggctagctacaacgaccgttacc

SEQ ID NO: 14886 - DNA, 31 bp, Artificial Sequence
  Description of Artificial Sequence:  Nucleic Acid
  misc_feature: DNAzyme
gtcctaaaggctagctacaacgaccgtccgt

SEQ ID NO: 14887 - DNA, 31 bp, Artificial Sequence
  Description of Artificial Sequence:  Nucleic Acid
  misc_feature: DNAzyme
agtgctcgggctagctacaacgacctaaatc

SEQ ID NO: 14888 - DNA, 31 bp, Artificial Sequence
  Description of Artificial Sequence:  Nucleic Acid
  misc_feature: DNAzyme
acaaagtgggctagctacaacgatcgtccta

SEQ ID NO: 14889 - DNA, 31 bp, Artificial Sequence
  Description of Artificial Sequence:  Nucleic Acid
  misc_feature: DNAzyme
gtacaaagggctagctacaacgagctcgtcc

SEQ ID NO: 14890 - DNA, 31 bp, Artificial Sequence
  Description of Artificial Sequence:  Nucleic Acid
  misc_feature: DNAzyme
caagggtaggctagctacaacgaaaagtgct

SEQ ID NO: 14891 - DNA, 31 bp, Artificial Sequence
  Description of Artificial Sequence:  Nucleic Acid
  misc_feature: DNAzyme
cccaagggggctagctacaacgaacaaagtg

SEQ ID NO: 14892 - DNA, 31 bp, Artificial Sequence
  Description of Artificial Sequence:  Nucleic Acid
  misc_feature: DNAzyme
atatgcagggctagctacaacgaccaagggt

SEQ ID NO: 14893 - DNA, 31 bp, Artificial Sequence
  Description of Artificial Sequence:  Nucleic Acid
  misc_feature: DNAzyme
tgcatatgggctagctacaacgaagcccaag

SEQ ID NO: 14894 - DNA, 31 bp, Artificial Sequence
  Description of Artificial Sequence:  Nucleic Acid
  misc_feature: DNAzyme
gctgcataggctagctacaacgagcagccca

SEQ ID NO: 14895 - DNA, 31 bp, Artificial Sequence
  Description of Artificial Sequence:  Nucleic Acid
  misc_feature: DNAzyme
cggctgcaggctagctacaacgaatgcagcc

SEQ ID NO: 14896 - DNA, 31 bp, Artificial Sequence
  Description of Artificial Sequence:  Nucleic Acid
  misc_feature: DNAzyme
accggctgggctagctacaacgaatatgcag

SEQ ID NO: 14897 - DNA, 31 bp, Artificial Sequence
  Description of Artificial Sequence:  Nucleic Acid
  misc_feature: DNAzyme
ggtaccggggctagctacaacgatgcatatg

SEQ ID NO: 14898 - DNA, 31 bp, Artificial Sequence
  Description of Artificial Sequence:  Nucleic Acid
  misc_feature: DNAzyme
ctaaggtaggctagctacaacgacggctgca

SEQ ID NO: 14899 - DNA, 31 bp, Artificial Sequence
  Description of Artificial Sequence:  Nucleic Acid
  misc_feature: DNAzyme
cactaaggggctagctacaacgaaccggctg

SEQ ID NO: 14900 - DNA, 31 bp, Artificial Sequence
  Description of Artificial Sequence:  Nucleic Acid
  misc_feature: DNAzyme
caagagcaggctagctacaacgataaggtac

SEQ ID NO: 14901 - DNA, 31 bp, Artificial Sequence
  Description of Artificial Sequence:  Nucleic Acid
  misc_feature: DNAzyme
ggcaagagggctagctacaacgaactaaggt

SEQ ID NO: 14902 - DNA, 31 bp, Artificial Sequence
  Description of Artificial Sequence:  Nucleic Acid
  misc_feature: DNAzyme
ggcagcggggctagctacaacgaaagagcac

SEQ ID NO: 14903 - DNA, 31 bp, Artificial Sequence
  Description of Artificial Sequence:  Nucleic Acid
  misc_feature: DNAzyme
actggcagggctagctacaacgaggcaagag

SEQ ID NO: 14904 - DNA, 31 bp, Artificial Sequence
  Description of Artificial Sequence:  Nucleic Acid
  misc_feature: DNAzyme
cccactggggctagctacaacgaagcggcaa

SEQ ID NO: 14905 - DNA, 31 bp, Artificial Sequence
  Description of Artificial Sequence:  Nucleic Acid
  misc_feature: DNAzyme
cgctcccaggctagctacaacgatggcagcg

SEQ ID NO: 14906 - DNA, 31 bp, Artificial Sequence
  Description of Artificial Sequence:  Nucleic Acid
  misc_feature: DNAzyme
cctacacgggctagctacaacgatcccactg

SEQ ID NO: 14907 - DNA, 31 bp, Artificial Sequence
  Description of Artificial Sequence:  Nucleic Acid
  misc_feature: DNAzyme
cacctacaggctagctacaacgagctcccac

SEQ ID NO: 14908 - DNA, 31 bp, Artificial Sequence
  Description of Artificial Sequence:  Nucleic Acid
  misc_feature: DNAzyme
cccacctaggctagctacaacgaacgctccc

SEQ ID NO: 14909 - DNA, 31 bp, Artificial Sequence
  Description of Artificial Sequence:  Nucleic Acid
  misc_feature: DNAzyme
gtggcccaggctagctacaacgactacacgc

SEQ ID NO: 14910 - DNA, 31 bp, Artificial Sequence
  Description of Artificial Sequence:  Nucleic Acid
  misc_feature: DNAzyme
ccaagtggggctagctacaacgaccacctac

SEQ ID NO: 14911 - DNA, 31 bp, Artificial Sequence
  Description of Artificial Sequence:  Nucleic Acid
  misc_feature: DNAzyme
attccaagggctagctacaacgaggcccacc

SEQ ID NO: 14912 - DNA, 31 bp, Artificial Sequence
  Description of Artificial Sequence:  Nucleic Acid
  misc_feature: DNAzyme
cgcagacaggctagctacaacgatccaagtg

SEQ ID NO: 14913 - DNA, 31 bp, Artificial Sequence
  Description of Artificial Sequence:  Nucleic Acid
  misc_feature: DNAzyme
accgcagaggctagctacaacgaattccaag

SEQ ID NO: 14914 - DNA, 31 bp, Artificial Sequence
  Description of Artificial Sequence:  Nucleic Acid
  misc_feature: DNAzyme
ccgtaccgggctagctacaacgaagacattc

SEQ ID NO: 14915 - DNA, 31 bp, Artificial Sequence
  Description of Artificial Sequence:  Nucleic Acid
  misc_feature: DNAzyme
cagccgtaggctagctacaacgacgcagaca

SEQ ID NO: 14916 - DNA, 31 bp, Artificial Sequence
  Description of Artificial Sequence:  Nucleic Acid
  misc_feature: DNAzyme
cccagccgggctagctacaacgaaccgcaga

SEQ ID NO: 14917 - DNA, 31 bp, Artificial Sequence
  Description of Artificial Sequence:  Nucleic Acid
  misc_feature: DNAzyme
ccccccagggctagctacaacgacgtaccgc

SEQ ID NO: 14918 - DNA, 31 bp, Artificial Sequence
  Description of Artificial Sequence:  Nucleic Acid
  misc_feature: DNAzyme
acaactcgggctagctacaacgaccccccca

SEQ ID NO: 14919 - DNA, 31 bp, Artificial Sequence
  Description of Artificial Sequence:  Nucleic Acid
  misc_feature: DNAzyme
acggacaaggctagctacaacgatcgtcccc

SEQ ID NO: 14920 - DNA, 31 bp, Artificial Sequence
  Description of Artificial Sequence:  Nucleic Acid
  misc_feature: DNAzyme
ttcacggaggctagctacaacgaaactcgtc

SEQ ID NO: 14921 - DNA, 31 bp, Artificial Sequence
  Description of Artificial Sequence:  Nucleic Acid
  misc_feature: DNAzyme
ggtcttcaggctagctacaacgaggacaact

SEQ ID NO: 14922 - DNA, 31 bp, Artificial Sequence
  Description of Artificial Sequence:  Nucleic Acid
  misc_feature: DNAzyme
gtccccggggctagctacaacgacttcacgg

SEQ ID NO: 14923 - DNA, 31 bp, Artificial Sequence
  Description of Artificial Sequence:  Nucleic Acid
  misc_feature: DNAzyme
ccatgcggggctagctacaacgaccccggtc

SEQ ID NO: 14924 - DNA, 31 bp, Artificial Sequence
  Description of Artificial Sequence:  Nucleic Acid
  misc_feature: DNAzyme
ctaccatgggctagctacaacgaggtccccg

SEQ ID NO: 14925 - DNA, 31 bp, Artificial Sequence
  Description of Artificial Sequence:  Nucleic Acid
  misc_feature: DNAzyme
aactaccaggctagctacaacgagcggtccc

SEQ ID NO: 14926 - DNA, 31 bp, Artificial Sequence
  Description of Artificial Sequence:  Nucleic Acid
  misc_feature: DNAzyme
ggaaactaggctagctacaacgacatgcggt

SEQ ID NO: 14927 - DNA, 31 bp, Artificial Sequence
  Description of Artificial Sequence:  Nucleic Acid
  misc_feature: DNAzyme
tatggaaaggctagctacaacgataccatgc

SEQ ID NO: 14928 - DNA, 31 bp, Artificial Sequence
  Description of Artificial Sequence:  Nucleic Acid
  misc_feature: DNAzyme
tgagtctaggctagctacaacgaggaaacta

SEQ ID NO: 14929 - DNA, 31 bp, Artificial Sequence
  Description of Artificial Sequence:  Nucleic Acid
  misc_feature: DNAzyme
ccgttgagggctagctacaacgactatggaa

SEQ ID NO: 14930 - DNA, 31 bp, Artificial Sequence
  Description of Artificial Sequence:  Nucleic Acid
  misc_feature: DNAzyme
tgtacccgggctagctacaacgatgagtcta

SEQ ID NO: 14931 - DNA, 31 bp, Artificial Sequence
  Description of Artificial Sequence:  Nucleic Acid
  misc_feature: DNAzyme
actttgtaggctagctacaacgaccgttgag

SEQ ID NO: 14932 - DNA, 31 bp, Artificial Sequence
  Description of Artificial Sequence:  Nucleic Acid
  misc_feature: DNAzyme
ggactttgggctagctacaacgaacccgttg

SEQ ID NO: 14933 - DNA, 31 bp, Artificial Sequence
  Description of Artificial Sequence:  Nucleic Acid
  misc_feature: DNAzyme
gcggtggaggctagctacaacgatttgtacc

SEQ ID NO: 14934 - DNA, 31 bp, Artificial Sequence
  Description of Artificial Sequence:  Nucleic Acid
  misc_feature: DNAzyme
gaaggcggggctagctacaacgaggactttg

SEQ ID NO: 14935 - DNA, 31 bp, Artificial Sequence
  Description of Artificial Sequence:  Nucleic Acid
  misc_feature: DNAzyme
tgcgaaggggctagctacaacgaggtggact

SEQ ID NO: 14936 - DNA, 31 bp, Artificial Sequence
  Description of Artificial Sequence:  Nucleic Acid
  misc_feature: DNAzyme
gggggttgggctagctacaacgagaaggcgg

SEQ ID NO: 14937 - DNA, 31 bp, Artificial Sequence
  Description of Artificial Sequence:  Nucleic Acid
  misc_feature: DNAzyme
ccggggggggctagctacaacgatgcgaagg

SEQ ID NO: 14938 - DNA, 31 bp, Artificial Sequence
  Description of Artificial Sequence:  Nucleic Acid
  misc_feature: DNAzyme
tgtgtgcaggctagctacaacgaccgggggg

SEQ ID NO: 14939 - DNA, 31 bp, Artificial Sequence
  Description of Artificial Sequence:  Nucleic Acid
  misc_feature: DNAzyme
gctgtgtgggctagctacaacgaacccgggg

SEQ ID NO: 14940 - DNA, 31 bp, Artificial Sequence
  Description of Artificial Sequence:  Nucleic Acid
  misc_feature: DNAzyme
ctgctgtgggctagctacaacgagcacccgg

SEQ ID NO: 14941 - DNA, 31 bp, Artificial Sequence
  Description of Artificial Sequence:  Nucleic Acid
  misc_feature: DNAzyme
ggctgctgggctagctacaacgagtgcaccc

SEQ ID NO: 14942 - DNA, 31 bp, Artificial Sequence
  Description of Artificial Sequence:  Nucleic Acid
  misc_feature: DNAzyme
ccgggctgggctagctacaacgatgtgtgca

SEQ ID NO: 14943 - DNA, 31 bp, Artificial Sequence
  Description of Artificial Sequence:  Nucleic Acid
  misc_feature: DNAzyme
cttccgggggctagctacaacgatgctgtgt

SEQ ID NO: 14944 - DNA, 31 bp, Artificial Sequence
  Description of Artificial Sequence:  Nucleic Acid
  misc_feature: DNAzyme
tgtgggcaggctagctacaacgacttccggg

SEQ ID NO: 14945 - DNA, 31 bp, Artificial Sequence
  Description of Artificial Sequence:  Nucleic Acid
  misc_feature: DNAzyme
gttgtgggggctagctacaacgaatcttccg

SEQ ID NO: 14946 - DNA, 31 bp, Artificial Sequence
  Description of Artificial Sequence:  Nucleic Acid
  misc_feature: DNAzyme
gcacgttgggctagctacaacgagggcatct

SEQ ID NO: 14947 - DNA, 31 bp, Artificial Sequence
  Description of Artificial Sequence:  Nucleic Acid
  misc_feature: DNAzyme
ggggcacgggctagctacaacgatgtgggca

SEQ ID NO: 14948 - DNA, 31 bp, Artificial Sequence
  Description of Artificial Sequence:  Nucleic Acid
  misc_feature: DNAzyme
tcggggcaggctagctacaacgagttgtggg

SEQ ID NO: 14949 - DNA, 31 bp, Artificial Sequence
  Description of Artificial Sequence:  Nucleic Acid
  misc_feature: DNAzyme
cttcggggggctagctacaacgaacgttgtg

SEQ ID NO: 14950 - DNA, 31 bp, Artificial Sequence
  Description of Artificial Sequence:  Nucleic Acid
  misc_feature: DNAzyme
ctgctctgggctagctacaacgaccttcggg

SEQ ID NO: 14951 - DNA, 31 bp, Artificial Sequence
  Description of Artificial Sequence:  Nucleic Acid
  misc_feature: DNAzyme
gtccactgggctagctacaacgatctgccct

SEQ ID NO: 14952 - DNA, 31 bp, Artificial Sequence
  Description of Artificial Sequence:  Nucleic Acid
  misc_feature: DNAzyme
gcggtccaggctagctacaacgatgctctgc

SEQ ID NO: 14953 - DNA, 31 bp, Artificial Sequence
  Description of Artificial Sequence:  Nucleic Acid
  misc_feature: DNAzyme
tcgggcggggctagctacaacgaccactgct

SEQ ID NO: 14954 - DNA, 31 bp, Artificial Sequence
  Description of Artificial Sequence:  Nucleic Acid
  misc_feature: DNAzyme
tcctcgggggctagctacaacgaggtccact

SEQ ID NO: 14955 - DNA, 31 bp, Artificial Sequence
  Description of Artificial Sequence:  Nucleic Acid
  misc_feature: DNAzyme
ttgaagggggctagctacaacgatcctcggg

SEQ ID NO: 14956 - DNA, 31 bp, Artificial Sequence
  Description of Artificial Sequence:  Nucleic Acid
  misc_feature: DNAzyme
atctcctaggctagctacaacgattgaaggg

SEQ ID NO: 14957 - DNA, 31 bp, Artificial Sequence
  Description of Artificial Sequence:  Nucleic Acid
  misc_feature: DNAzyme
caggcccaggctagctacaacgactcctact

SEQ ID NO: 14958 - DNA, 31 bp, Artificial Sequence
  Description of Artificial Sequence:  Nucleic Acid
  misc_feature: DNAzyme
cccccaggggctagctacaacgaccatctcc

SEQ ID NO: 14959 - DNA, 31 bp, Artificial Sequence
  Description of Artificial Sequence:  Nucleic Acid
  misc_feature: DNAzyme
gcttactaggctagctacaacgacccccagg

SEQ ID NO: 14960 - DNA, 31 bp, Artificial Sequence
  Description of Artificial Sequence:  Nucleic Acid
  misc_feature: DNAzyme
ggagcttaggctagctacaacgatatccccc

SEQ ID NO: 14961 - DNA, 31 bp, Artificial Sequence
  Description of Artificial Sequence:  Nucleic Acid
  misc_feature: DNAzyme
agggggagggctagctacaacgattactatc

SEQ ID NO: 14962 - DNA, 31 bp, Artificial Sequence
  Description of Artificial Sequence:  Nucleic Acid
  misc_feature: DNAzyme
ggtgacagggctagctacaacgaagggggag

SEQ ID NO: 14963 - DNA, 31 bp, Artificial Sequence
  Description of Artificial Sequence:  Nucleic Acid
  misc_feature: DNAzyme
cggggtgaggctagctacaacgaagcagggg

SEQ ID NO: 14964 - DNA, 31 bp, Artificial Sequence
  Description of Artificial Sequence:  Nucleic Acid
  misc_feature: DNAzyme
cggcggggggctagctacaacgagacagcag

SEQ ID NO: 14965 - DNA, 31 bp, Artificial Sequence
  Description of Artificial Sequence:  Nucleic Acid
  misc_feature: DNAzyme
tgcgccggggctagctacaacgaggggtgac

SEQ ID NO: 14966 - DNA, 31 bp, Artificial Sequence
  Description of Artificial Sequence:  Nucleic Acid
  misc_feature: DNAzyme
ccggtgcgggctagctacaacgacggcgggg

SEQ ID NO: 14967 - DNA, 31 bp, Artificial Sequence
  Description of Artificial Sequence:  Nucleic Acid
  misc_feature: DNAzyme
ttccggtgggctagctacaacgagccggcgg

SEQ ID NO: 14968 - DNA, 31 bp, Artificial Sequence
  Description of Artificial Sequence:  Nucleic Acid
  misc_feature: DNAzyme
cattccggggctagctacaacgagcgccggc

SEQ ID NO: 14969 - DNA, 31 bp, Artificial Sequence
  Description of Artificial Sequence:  Nucleic Acid
  misc_feature: DNAzyme
tgatgtcaggctagctacaacgatccggtgc

SEQ ID NO: 14970 - DNA, 31 bp, Artificial Sequence
  Description of Artificial Sequence:  Nucleic Acid
  misc_feature: DNAzyme
cgctgatgggctagctacaacgacattccgg

SEQ ID NO: 14971 - DNA, 31 bp, Artificial Sequence
  Description of Artificial Sequence:  Nucleic Acid
  misc_feature: DNAzyme
cacgctgaggctagctacaacgagtcattcc

SEQ ID NO: 14972 - DNA, 31 bp, Artificial Sequence
  Description of Artificial Sequence:  Nucleic Acid
  misc_feature: DNAzyme
gagacacgggctagctacaacgatgatgtca

SEQ ID NO: 14973 - DNA, 31 bp, Artificial Sequence
  Description of Artificial Sequence:  Nucleic Acid
  misc_feature: DNAzyme
acgagacaggctagctacaacgagctgatgt

SEQ ID NO: 14974 - DNA, 31 bp, Artificial Sequence
  Description of Artificial Sequence:  Nucleic Acid
  misc_feature: DNAzyme
tcacgagaggctagctacaacgaacgctgat

SEQ ID NO: 14975 - DNA, 31 bp, Artificial Sequence
  Description of Artificial Sequence:  Nucleic Acid
  misc_feature: DNAzyme
cttggtcaggctagctacaacgagagacacg

SEQ ID NO: 14976 - DNA, 31 bp, Artificial Sequence
  Description of Artificial Sequence:  Nucleic Acid
  misc_feature: DNAzyme
ttacttggggctagctacaacgacacgagac

SEQ ID NO: 14977 - DNA, 31 bp, Artificial Sequence
  Description of Artificial Sequence:  Nucleic Acid
  misc_feature: DNAzyme
gacctttaggctagctacaacgattggtcac

SEQ ID NO: 14978 - DNA, 31 bp, Artificial Sequence
  Description of Artificial Sequence:  Nucleic Acid
  misc_feature: DNAzyme
ggctcggaggctagctacaacgactttactt

SEQ ID NO: 14979 - DNA, 31 bp, Artificial Sequence
  Description of Artificial Sequence:  Nucleic Acid
  misc_feature: DNAzyme
tgcggcggggctagctacaacgatcggacct

SEQ ID NO: 14980 - DNA, 31 bp, Artificial Sequence
  Description of Artificial Sequence:  Nucleic Acid
  misc_feature: DNAzyme
acctgcggggctagctacaacgaggctcgga

SEQ ID NO: 14981 - DNA, 31 bp, Artificial Sequence
  Description of Artificial Sequence:  Nucleic Acid
  misc_feature: DNAzyme
tgcacctgggctagctacaacgaggcggctc

SEQ ID NO: 14982 - DNA, 31 bp, Artificial Sequence
  Description of Artificial Sequence:  Nucleic Acid
  misc_feature: DNAzyme
accatgcaggctagctacaacgactgcggcg

SEQ ID NO: 14983 - DNA, 31 bp, Artificial Sequence
  Description of Artificial Sequence:  Nucleic Acid
  misc_feature: DNAzyme
acaccatgggctagctacaacgaacctgcgg

SEQ ID NO: 14984 - DNA, 31 bp, Artificial Sequence
  Description of Artificial Sequence:  Nucleic Acid
  misc_feature: DNAzyme
tgacaccaggctagctacaacgagcacctgc

SEQ ID NO: 14985 - DNA, 31 bp, Artificial Sequence
  Description of Artificial Sequence:  Nucleic Acid
  misc_feature: DNAzyme
ccttgacaggctagctacaacgacatgcacc

SEQ ID NO: 14986 - DNA, 31 bp, Artificial Sequence
  Description of Artificial Sequence:  Nucleic Acid
  misc_feature: DNAzyme
gtccttgaggctagctacaacgaaccatgca

SEQ ID NO: 14987 - DNA, 31 bp, Artificial Sequence
  Description of Artificial Sequence:  Nucleic Acid
  misc_feature: DNAzyme
gagcgcggggctagctacaacgaccttgaca

SEQ ID NO: 14988 - DNA, 31 bp, Artificial Sequence
  Description of Artificial Sequence:  Nucleic Acid
  misc_feature: DNAzyme
ccggagcgggctagctacaacgaggtccttg

SEQ ID NO: 14989 - DNA, 31 bp, Artificial Sequence
  Description of Artificial Sequence:  Nucleic Acid
  misc_feature: DNAzyme
ccccggagggctagctacaacgagcggtcct

SEQ ID NO: 14990 - DNA, 31 bp, Artificial Sequence
  Description of Artificial Sequence:  Nucleic Acid
  misc_feature: DNAzyme
ggccggcgggctagctacaacgacccccgga

SEQ ID NO: 14991 - DNA, 31 bp, Artificial Sequence
  Description of Artificial Sequence:  Nucleic Acid
  misc_feature: DNAzyme
atggccggggctagctacaacgagccccccg

SEQ ID NO: 14992 - DNA, 31 bp, Artificial Sequence
  Description of Artificial Sequence:  Nucleic Acid
  misc_feature: DNAzyme
tcggatggggctagctacaacgacggcgccc

SEQ ID NO: 14993 - DNA, 31 bp, Artificial Sequence
  Description of Artificial Sequence:  Nucleic Acid
  misc_feature: DNAzyme
tcgtcggaggctagctacaacgaggccggcg

SEQ ID NO: 14994 - DNA, 31 bp, Artificial Sequence
  Description of Artificial Sequence:  Nucleic Acid
  misc_feature: DNAzyme
ggacctcgggctagctacaacgacggatggc

SEQ ID NO: 14995 - DNA, 31 bp, Artificial Sequence
  Description of Artificial Sequence:  Nucleic Acid
  misc_feature: DNAzyme
gaccaggaggctagctacaacgactcgtcgg

SEQ ID NO: 14996 - DNA, 31 bp, Artificial Sequence
  Description of Artificial Sequence:  Nucleic Acid
  misc_feature: DNAzyme
aatgtagaggctagctacaacgacaggacct

SEQ ID NO: 14997 - DNA, 31 bp, Artificial Sequence
  Description of Artificial Sequence:  Nucleic Acid
  misc_feature: DNAzyme
caccaatgggctagctacaacgaagaccagg

SEQ ID NO: 14998 - DNA, 31 bp, Artificial Sequence
  Description of Artificial Sequence:  Nucleic Acid
  misc_feature: DNAzyme
tacaccaaggctagctacaacgagtagacca

SEQ ID NO: 14999 - DNA, 31 bp, Artificial Sequence
  Description of Artificial Sequence:  Nucleic Acid
  misc_feature: DNAzyme
aatgtacaggctagctacaacgacaatgtag

SEQ ID NO: 15000 - DNA, 31 bp, Artificial Sequence
  Description of Artificial Sequence:  Nucleic Acid
  misc_feature: DNAzyme
caaatgtaggctagctacaacgaaccaatgt

SEQ ID NO: 15001 - DNA, 31 bp, Artificial Sequence
  Description of Artificial Sequence:  Nucleic Acid
  misc_feature: DNAzyme
cccaaatgggctagctacaacgaacaccaat

SEQ ID NO: 15002 - DNA, 31 bp, Artificial Sequence
  Description of Artificial Sequence:  Nucleic Acid
  misc_feature: DNAzyme
cacccaaaggctagctacaacgagtacacca

SEQ ID NO: 15003 - DNA, 31 bp, Artificial Sequence
  Description of Artificial Sequence:  Nucleic Acid
  misc_feature: DNAzyme
tccaatcaggctagctacaacgaccaaatgt

SEQ ID NO: 15004 - DNA, 31 bp, Artificial Sequence
  Description of Artificial Sequence:  Nucleic Acid
  misc_feature: DNAzyme
gggtccaaggctagctacaacgacacccaaa

SEQ ID NO: 15005 - DNA, 31 bp, Artificial Sequence
  Description of Artificial Sequence:  Nucleic Acid
  misc_feature: DNAzyme
ccaaagggggctagctacaacgaccaatcac

SEQ ID NO: 15006 - DNA, 31 bp, Artificial Sequence
  Description of Artificial Sequence:  Nucleic Acid
  misc_feature: DNAzyme
ctagccggggctagctacaacgaccaaaggg

SEQ ID NO: 15007 - DNA, 31 bp, Artificial Sequence
  Description of Artificial Sequence:  Nucleic Acid
  misc_feature: DNAzyme
gaccctagggctagctacaacgacggcccaa

SEQ ID NO: 15008 - DNA, 31 bp, Artificial Sequence
  Description of Artificial Sequence:  Nucleic Acid
  misc_feature: DNAzyme
ctcaaagaggctagctacaacgacctagccg

SEQ ID NO: 15009 - DNA, 31 bp, Artificial Sequence
  Description of Artificial Sequence:  Nucleic Acid
  misc_feature: DNAzyme
ggcgccggggctagctacaacgatcaaagac

SEQ ID NO: 15010 - DNA, 31 bp, Artificial Sequence
  Description of Artificial Sequence:  Nucleic Acid
  misc_feature: DNAzyme
ccacggcgggctagctacaacgacggctcaa

SEQ ID NO: 15011 - DNA, 31 bp, Artificial Sequence
  Description of Artificial Sequence:  Nucleic Acid
  misc_feature: DNAzyme
taccacggggctagctacaacgagccggctc

SEQ ID NO: 15012 - DNA, 31 bp, Artificial Sequence
  Description of Artificial Sequence:  Nucleic Acid
  misc_feature: DNAzyme
gtctaccaggctagctacaacgaggcgccgg

SEQ ID NO: 15013 - DNA, 31 bp, Artificial Sequence
  Description of Artificial Sequence:  Nucleic Acid
  misc_feature: DNAzyme
actgtctaggctagctacaacgacacggcgc

SEQ ID NO: 15014 - DNA, 31 bp, Artificial Sequence
  Description of Artificial Sequence:  Nucleic Acid
  misc_feature: DNAzyme
ctggactgggctagctacaacgactaccacg

SEQ ID NO: 15015 - DNA, 31 bp, Artificial Sequence
  Description of Artificial Sequence:  Nucleic Acid
  misc_feature: DNAzyme
gtgctggaggctagctacaacgatgtctacc

SEQ ID NO: 15016 - DNA, 31 bp, Artificial Sequence
  Description of Artificial Sequence:  Nucleic Acid
  misc_feature: DNAzyme
ggcgtgtgggctagctacaacgatggactgt

SEQ ID NO: 15017 - DNA, 31 bp, Artificial Sequence
  Description of Artificial Sequence:  Nucleic Acid
  misc_feature: DNAzyme
acggcgtgggctagctacaacgagctggact

SEQ ID NO: 15018 - DNA, 31 bp, Artificial Sequence
  Description of Artificial Sequence:  Nucleic Acid
  misc_feature: DNAzyme
caacggcgggctagctacaacgagtgctgga

SEQ ID NO: 15019 - DNA, 31 bp, Artificial Sequence
  Description of Artificial Sequence:  Nucleic Acid
  misc_feature: DNAzyme
gtcaacggggctagctacaacgagtgtgctg

SEQ ID NO: 15020 - DNA, 31 bp, Artificial Sequence
  Description of Artificial Sequence:  Nucleic Acid
  misc_feature: DNAzyme
tgcgtcaaggctagctacaacgaggcgtgtg

SEQ ID NO: 15021 - DNA, 31 bp, Artificial Sequence
  Description of Artificial Sequence:  Nucleic Acid
  misc_feature: DNAzyme
gacctgcgggctagctacaacgacaacggcg

SEQ ID NO: 15022 - DNA, 31 bp, Artificial Sequence
  Description of Artificial Sequence:  Nucleic Acid
  misc_feature: DNAzyme
gcgacctgggctagctacaacgagtcaacgg

SEQ ID NO: 15023 - DNA, 31 bp, Artificial Sequence
  Description of Artificial Sequence:  Nucleic Acid
  misc_feature: DNAzyme
cctagcgaggctagctacaacgactgcgtca

SEQ ID NO: 15024 - DNA, 31 bp, Artificial Sequence
  Description of Artificial Sequence:  Nucleic Acid
  misc_feature: DNAzyme
tttcctagggctagctacaacgagacctgcg

SEQ ID NO: 15025 - DNA, 31 bp, Artificial Sequence
  Description of Artificial Sequence:  Nucleic Acid
  misc_feature: DNAzyme
cgacgcagggctagctacaacgactttccta

SEQ ID NO: 15026 - DNA, 31 bp, Artificial Sequence
  Description of Artificial Sequence:  Nucleic Acid
  misc_feature: DNAzyme
ccgcgacgggctagctacaacgaagtctttc

SEQ ID NO: 15027 - DNA, 31 bp, Artificial Sequence
  Description of Artificial Sequence:  Nucleic Acid
  misc_feature: DNAzyme
caccgcgaggctagctacaacgagcagtctt

SEQ ID NO: 15028 - DNA, 31 bp, Artificial Sequence
  Description of Artificial Sequence:  Nucleic Acid
  misc_feature: DNAzyme
ttccaccgggctagctacaacgagacgcagt

SEQ ID NO: 15029 - DNA, 31 bp, Artificial Sequence
  Description of Artificial Sequence:  Nucleic Acid
  misc_feature: DNAzyme
ggtttccaggctagctacaacgacgcgacgc

SEQ ID NO: 15030 - DNA, 31 bp, Artificial Sequence
  Description of Artificial Sequence:  Nucleic Acid
  misc_feature: DNAzyme
tcaagtggggctagctacaacgattccaccg

SEQ ID NO: 15031 - DNA, 31 bp, Artificial Sequence
  Description of Artificial Sequence:  Nucleic Acid
  misc_feature: DNAzyme
agttcaagggctagctacaacgaggtttcca

SEQ ID NO: 15032 - DNA, 31 bp, Artificial Sequence
  Description of Artificial Sequence:  Nucleic Acid
  misc_feature: DNAzyme
gggggaagggctagctacaacgatcaagtgg

SEQ ID NO: 15033 - DNA, 31 bp, Artificial Sequence
  Description of Artificial Sequence:  Nucleic Acid
  misc_feature: DNAzyme
gaaccaagggctagctacaacgacgaggggg

SEQ ID NO: 15034 - DNA, 31 bp, Artificial Sequence
  Description of Artificial Sequence:  Nucleic Acid
  misc_feature: DNAzyme
gacaagaaggctagctacaacgacaagtcga

SEQ ID NO: 15035 - DNA, 31 bp, Artificial Sequence
  Description of Artificial Sequence:  Nucleic Acid
  misc_feature: DNAzyme
ggccgggaggctagctacaacgaaagaacca

SEQ ID NO: 15036 - DNA, 31 bp, Artificial Sequence
  Description of Artificial Sequence:  Nucleic Acid
  misc_feature: DNAzyme
ctcacgggggctagctacaacgacgggacaa

SEQ ID NO: 15037 - DNA, 31 bp, Artificial Sequence
  Description of Artificial Sequence:  Nucleic Acid
  misc_feature: DNAzyme
cagcctcaggctagctacaacgagggccggg

SEQ ID NO: 15038 - DNA, 31 bp, Artificial Sequence
  Description of Artificial Sequence:  Nucleic Acid
  misc_feature: DNAzyme
atcaccagggctagctacaacgactcacggg

SEQ ID NO: 15039 - DNA, 31 bp, Artificial Sequence
  Description of Artificial Sequence:  Nucleic Acid
  misc_feature: DNAzyme
cattatcaggctagctacaacgacagcctca

SEQ ID NO: 15040 - DNA, 31 bp, Artificial Sequence
  Description of Artificial Sequence:  Nucleic Acid
  misc_feature: DNAzyme
ctgcattaggctagctacaacgacaccagcc

SEQ ID NO: 15041 - DNA, 31 bp, Artificial Sequence
  Description of Artificial Sequence:  Nucleic Acid
  misc_feature: DNAzyme
tggctgcaggctagctacaacgatatcacca

SEQ ID NO: 15042 - DNA, 31 bp, Artificial Sequence
  Description of Artificial Sequence:  Nucleic Acid
  misc_feature: DNAzyme
tttggctgggctagctacaacgaattatcac

SEQ ID NO: 15043 - DNA, 31 bp, Artificial Sequence
  Description of Artificial Sequence:  Nucleic Acid
  misc_feature: DNAzyme
ctgtttggggctagctacaacgatgcattat

SEQ ID NO: 15044 - DNA, 31 bp, Artificial Sequence
  Description of Artificial Sequence:  Nucleic Acid
  misc_feature: DNAzyme
ggggcctgggctagctacaacgattggctgc

SEQ ID NO: 15045 - DNA, 31 bp, Artificial Sequence
  Description of Artificial Sequence:  Nucleic Acid
  misc_feature: DNAzyme
acgcggggggctagctacaacgactgtttgg

SEQ ID NO: 15046 - DNA, 31 bp, Artificial Sequence
  Description of Artificial Sequence:  Nucleic Acid
  misc_feature: DNAzyme
aacagacgggctagctacaacgaggggcctg

SEQ ID NO: 15047 - DNA, 31 bp, Artificial Sequence
  Description of Artificial Sequence:  Nucleic Acid
  misc_feature: DNAzyme
ccaacagaggctagctacaacgagcggggcc

SEQ ID NO: 15048 - DNA, 31 bp, Artificial Sequence
  Description of Artificial Sequence:  Nucleic Acid
  misc_feature: DNAzyme
actcccaaggctagctacaacgaagacgcgg

SEQ ID NO: 15049 - DNA, 31 bp, Artificial Sequence
  Description of Artificial Sequence:  Nucleic Acid
  misc_feature: DNAzyme
acggcctaggctagctacaacgatcccaaca

SEQ ID NO: 15050 - DNA, 31 bp, Artificial Sequence
  Description of Artificial Sequence:  Nucleic Acid
  misc_feature: DNAzyme
cattacggggctagctacaacgactactccc

SEQ ID NO: 15051 - DNA, 31 bp, Artificial Sequence
  Description of Artificial Sequence:  Nucleic Acid
  misc_feature: DNAzyme
gcccattaggctagctacaacgaggcctact

SEQ ID NO: 15052 - DNA, 31 bp, Artificial Sequence
  Description of Artificial Sequence:  Nucleic Acid
  misc_feature: DNAzyme
cgcgcccaggctagctacaacgatacggcct

SEQ ID NO: 15053 - DNA, 31 bp, Artificial Sequence
  Description of Artificial Sequence:  Nucleic Acid
  misc_feature: DNAzyme
tcctcgcgggctagctacaacgaccattacg

SEQ ID NO: 15054 - DNA, 31 bp, Artificial Sequence
  Description of Artificial Sequence:  Nucleic Acid
  misc_feature: DNAzyme
actcctcgggctagctacaacgagcccatta

SEQ ID NO: 15055 - DNA, 31 bp, Artificial Sequence
  Description of Artificial Sequence:  Nucleic Acid
  misc_feature: DNAzyme
ggtggcgaggctagctacaacgatcctcgcg

SEQ ID NO: 15056 - DNA, 31 bp, Artificial Sequence
  Description of Artificial Sequence:  Nucleic Acid
  misc_feature: DNAzyme
aggggtggggctagctacaacgagactcctc

SEQ ID NO: 15057 - DNA, 31 bp, Artificial Sequence
  Description of Artificial Sequence:  Nucleic Acid
  misc_feature: DNAzyme
ggcaggggggctagctacaacgaggcgactc

SEQ ID NO: 15058 - DNA, 31 bp, Artificial Sequence
  Description of Artificial Sequence:  Nucleic Acid
  misc_feature: DNAzyme
ttgaggggggctagctacaacgaaggggtgg

SEQ ID NO: 15059 - DNA, 31 bp, Artificial Sequence
  Description of Artificial Sequence:  Nucleic Acid
  misc_feature: DNAzyme
gccgacagggctagctacaacgacttgaggg

SEQ ID NO: 15060 - DNA, 31 bp, Artificial Sequence
  Description of Artificial Sequence:  Nucleic Acid
  misc_feature: DNAzyme
ccagccgaggctagctacaacgaagtcttga

SEQ ID NO: 15061 - DNA, 31 bp, Artificial Sequence
  Description of Artificial Sequence:  Nucleic Acid
  misc_feature: DNAzyme
aggaccagggctagctacaacgacgacagtc

SEQ ID NO: 15062 - DNA, 31 bp, Artificial Sequence
  Description of Artificial Sequence:  Nucleic Acid
  misc_feature: DNAzyme
tcctaggaggctagctacaacgacagccgac

SEQ ID NO: 15063 - DNA, 31 bp, Artificial Sequence
  Description of Artificial Sequence:  Nucleic Acid
  misc_feature: DNAzyme
gggagataggctagctacaacgatcctagga

SEQ ID NO: 15064 - DNA, 31 bp, Artificial Sequence
  Description of Artificial Sequence:  Nucleic Acid
  misc_feature: DNAzyme
gagggagaggctagctacaacgaactcctag

SEQ ID NO: 15065 - DNA, 31 bp, Artificial Sequence
  Description of Artificial Sequence:  Nucleic Acid
  misc_feature: DNAzyme
tgtctccgggctagctacaacgaccgaaggg

SEQ ID NO: 15066 - DNA, 31 bp, Artificial Sequence
  Description of Artificial Sequence:  Nucleic Acid
  misc_feature: DNAzyme
tctacctgggctagctacaacgactccgccc

SEQ ID NO: 15067 - DNA, 31 bp, Artificial Sequence
  Description of Artificial Sequence:  Nucleic Acid
  misc_feature: DNAzyme
tgggtctaggctagctacaacgactgtctcc

SEQ ID NO: 15068 - DNA, 31 bp, Artificial Sequence
  Description of Artificial Sequence:  Nucleic Acid
  misc_feature: DNAzyme
attatgggggctagctacaacgactacctgt

SEQ ID NO: 15069 - DNA, 31 bp, Artificial Sequence
  Description of Artificial Sequence:  Nucleic Acid
  misc_feature: DNAzyme
catcattaggctagctacaacgagggtctac

SEQ ID NO: 15070 - DNA, 31 bp, Artificial Sequence
  Description of Artificial Sequence:  Nucleic Acid
  misc_feature: DNAzyme
ggacatcaggctagctacaacgatatgggtc

SEQ ID NO: 15071 - DNA, 31 bp, Artificial Sequence
  Description of Artificial Sequence:  Nucleic Acid
  misc_feature: DNAzyme
tggggacaggctagctacaacgacattatgg

SEQ ID NO: 15072 - DNA, 31 bp, Artificial Sequence
  Description of Artificial Sequence:  Nucleic Acid
  misc_feature: DNAzyme
tgtggggaggctagctacaacgaatcattat

SEQ ID NO: 15073 - DNA, 31 bp, Artificial Sequence
  Description of Artificial Sequence:  Nucleic Acid
  misc_feature: DNAzyme
gcggcgtgggctagctacaacgaggggacat

SEQ ID NO: 15074 - DNA, 31 bp, Artificial Sequence
  Description of Artificial Sequence:  Nucleic Acid
  misc_feature: DNAzyme
ccgcggcgggctagctacaacgagtggggac

SEQ ID NO: 15075 - DNA, 31 bp, Artificial Sequence
  Description of Artificial Sequence:  Nucleic Acid
  misc_feature: DNAzyme
caccgcggggctagctacaacgagtgtgggg

SEQ ID NO: 15076 - DNA, 31 bp, Artificial Sequence
  Description of Artificial Sequence:  Nucleic Acid
  misc_feature: DNAzyme
agacaccgggctagctacaacgaggcgtgtg

SEQ ID NO: 15077 - DNA, 31 bp, Artificial Sequence
  Description of Artificial Sequence:  Nucleic Acid
  misc_feature: DNAzyme
gggagacaggctagctacaacgacgcggcgt

SEQ ID NO: 15078 - DNA, 31 bp, Artificial Sequence
  Description of Artificial Sequence:  Nucleic Acid
  misc_feature: DNAzyme
gggggagaggctagctacaacgaaccgcggc

SEQ ID NO: 15079 - DNA, 31 bp, Artificial Sequence
  Description of Artificial Sequence:  Nucleic Acid
  misc_feature: DNAzyme
gatcatcaggctagctacaacgactgggggg

SEQ ID NO: 15080 - DNA, 31 bp, Artificial Sequence
  Description of Artificial Sequence:  Nucleic Acid
  misc_feature: DNAzyme
caagatcaggctagctacaacgacacctggg

SEQ ID NO: 15081 - DNA, 31 bp, Artificial Sequence
  Description of Artificial Sequence:  Nucleic Acid
  misc_feature: DNAzyme
aatcaagaggctagctacaacgacatcacct

SEQ ID NO: 15082 - DNA, 31 bp, Artificial Sequence
  Description of Artificial Sequence:  Nucleic Acid
  misc_feature: DNAzyme
catggaaaggctagctacaacgacaagatca

SEQ ID NO: 15083 - DNA, 31 bp, Artificial Sequence
  Description of Artificial Sequence:  Nucleic Acid
  misc_feature: DNAzyme
ctccgacaggctagctacaacgaggaaatca

SEQ ID NO: 15084 - DNA, 31 bp, Artificial Sequence
  Description of Artificial Sequence:  Nucleic Acid
  misc_feature: DNAzyme
ttctccgaggctagctacaacgaatggaaat

SEQ ID NO: 15085 - DNA, 31 bp, Artificial Sequence
  Description of Artificial Sequence:  Nucleic Acid
  misc_feature: DNAzyme
gcccgtcgggctagctacaacgacttctccg

SEQ ID NO: 15086 - DNA, 31 bp, Artificial Sequence
  Description of Artificial Sequence:  Nucleic Acid
  misc_feature: DNAzyme
cgagcccgggctagctacaacgacgtcttct

SEQ ID NO: 15087 - DNA, 31 bp, Artificial Sequence
  Description of Artificial Sequence:  Nucleic Acid
  misc_feature: DNAzyme
cggtcgagggctagctacaacgaccgtcgtc

SEQ ID NO: 15088 - DNA, 31 bp, Artificial Sequence
  Description of Artificial Sequence:  Nucleic Acid
  misc_feature: DNAzyme
ggtagcggggctagctacaacgacgagcccg

SEQ ID NO: 15089 - DNA, 31 bp, Artificial Sequence
  Description of Artificial Sequence:  Nucleic Acid
  misc_feature: DNAzyme
ggcggtagggctagctacaacgaggtcgagc

SEQ ID NO: 15090 - DNA, 31 bp, Artificial Sequence
  Description of Artificial Sequence:  Nucleic Acid
  misc_feature: DNAzyme
cctggcggggctagctacaacgaagcggtcg

SEQ ID NO: 15091 - DNA, 31 bp, Artificial Sequence
  Description of Artificial Sequence:  Nucleic Acid
  misc_feature: DNAzyme
agacctggggctagctacaacgaggtagcgg

SEQ ID NO: 15092 - DNA, 31 bp, Artificial Sequence
  Description of Artificial Sequence:  Nucleic Acid
  misc_feature: DNAzyme
ctacgagaggctagctacaacgactggcggt

SEQ ID NO: 15093 - DNA, 31 bp, Artificial Sequence
  Description of Artificial Sequence:  Nucleic Acid
  misc_feature: DNAzyme
caggtctaggctagctacaacgagagacctg

SEQ ID NO: 15094 - DNA, 31 bp, Artificial Sequence
  Description of Artificial Sequence:  Nucleic Acid
  misc_feature: DNAzyme
cacacaggggctagctacaacgactacgaga

SEQ ID NO: 15095 - DNA, 31 bp, Artificial Sequence
  Description of Artificial Sequence:  Nucleic Acid
  misc_feature: DNAzyme
ggcccacaggctagctacaacgaaggtctac

SEQ ID NO: 15096 - DNA, 31 bp, Artificial Sequence
  Description of Artificial Sequence:  Nucleic Acid
  misc_feature: DNAzyme
tgggcccaggctagctacaacgaacaggtct

SEQ ID NO: 15097 - DNA, 31 bp, Artificial Sequence
  Description of Artificial Sequence:  Nucleic Acid
  misc_feature: DNAzyme
ggactgggggctagctacaacgaccacacag

SEQ ID NO: 15098 - DNA, 31 bp, Artificial Sequence
  Description of Artificial Sequence:  Nucleic Acid
  misc_feature: DNAzyme
ctgcaggaggctagctacaacgatgggccca

SEQ ID NO: 15099 - DNA, 31 bp, Artificial Sequence
  Description of Artificial Sequence:  Nucleic Acid
  misc_feature: DNAzyme
ctccactgggctagctacaacgaaggactgg

SEQ ID NO: 15100 - DNA, 31 bp, Artificial Sequence
  Description of Artificial Sequence:  Nucleic Acid
  misc_feature: DNAzyme
tcactccaggctagctacaacgatgcaggac

SEQ ID NO: 15101 - DNA, 31 bp, Artificial Sequence
  Description of Artificial Sequence:  Nucleic Acid
  misc_feature: DNAzyme
ccacctcaggctagctacaacgatccactgc

SEQ ID NO: 15102 - DNA, 31 bp, Artificial Sequence
  Description of Artificial Sequence:  Nucleic Acid
  misc_feature: DNAzyme
tatgaccaggctagctacaacgactcactcc

SEQ ID NO: 15103 - DNA, 31 bp, Artificial Sequence
  Description of Artificial Sequence:  Nucleic Acid
  misc_feature: DNAzyme
gtctatgaggctagctacaacgacacctcac

SEQ ID NO: 15104 - DNA, 31 bp, Artificial Sequence
  Description of Artificial Sequence:  Nucleic Acid
  misc_feature: DNAzyme
tccgtctaggctagctacaacgagaccacct

SEQ ID NO: 15105 - DNA, 31 bp, Artificial Sequence
  Description of Artificial Sequence:  Nucleic Acid
  misc_feature: DNAzyme
tacgtccgggctagctacaacgactatgacc

SEQ ID NO: 15106 - DNA, 31 bp, Artificial Sequence
  Description of Artificial Sequence:  Nucleic Acid
  misc_feature: DNAzyme
aaggtacgggctagctacaacgaccgtctat

SEQ ID NO: 15107 - DNA, 31 bp, Artificial Sequence
  Description of Artificial Sequence:  Nucleic Acid
  misc_feature: DNAzyme
gaaaggtaggctagctacaacgagtccgtct

SEQ ID NO: 15108 - DNA, 31 bp, Artificial Sequence
  Description of Artificial Sequence:  Nucleic Acid
  misc_feature: DNAzyme
ttgaaaggggctagctacaacgaacgtccgt

SEQ ID NO: 15109 - DNA, 31 bp, Artificial Sequence
  Description of Artificial Sequence:  Nucleic Acid
  misc_feature: DNAzyme
tggccgaaggctagctacaacgatgaaaggt

SEQ ID NO: 15110 - DNA, 31 bp, Artificial Sequence
  Description of Artificial Sequence:  Nucleic Acid
  misc_feature: DNAzyme
gaagttggggctagctacaacgacgaattga

SEQ ID NO: 15111 - DNA, 31 bp, Artificial Sequence
  Description of Artificial Sequence:  Nucleic Acid
  misc_feature: DNAzyme
tcatgaagggctagctacaacgatggccgaa

SEQ ID NO: 15112 - DNA, 31 bp, Artificial Sequence
  Description of Artificial Sequence:  Nucleic Acid
  misc_feature: DNAzyme
ggccttcaggctagctacaacgagaagttgg

SEQ ID NO: 15113 - DNA, 31 bp, Artificial Sequence
  Description of Artificial Sequence:  Nucleic Acid
  misc_feature: DNAzyme
ccaaatggggctagctacaacgacttcatga

SEQ ID NO: 15114 - DNA, 31 bp, Artificial Sequence
  Description of Artificial Sequence:  Nucleic Acid
  misc_feature: DNAzyme
tgtccaaaggctagctacaacgaggccttca

SEQ ID NO: 15115 - DNA, 31 bp, Artificial Sequence
  Description of Artificial Sequence:  Nucleic Acid
  misc_feature: DNAzyme
gcaatatgggctagctacaacgaccaaatgg

SEQ ID NO: 15116 - DNA, 31 bp, Artificial Sequence
  Description of Artificial Sequence:  Nucleic Acid
  misc_feature: DNAzyme
gggcaataggctagctacaacgagtccaaat

SEQ ID NO: 15117 - DNA, 31 bp, Artificial Sequence
  Description of Artificial Sequence:  Nucleic Acid
  misc_feature: DNAzyme
gggggcaaggctagctacaacgaatgtccaa

SEQ ID NO: 15118 - DNA, 31 bp, Artificial Sequence
  Description of Artificial Sequence:  Nucleic Acid
  misc_feature: DNAzyme
gtggggggggctagctacaacgaaatatgtc

SEQ ID NO: 15119 - DNA, 31 bp, Artificial Sequence
  Description of Artificial Sequence:  Nucleic Acid
  misc_feature: DNAzyme
aaagtcggggctagctacaacgaggggggca

SEQ ID NO: 15120 - DNA, 31 bp, Artificial Sequence
  Description of Artificial Sequence:  Nucleic Acid
  misc_feature: DNAzyme
gcggaaagggctagctacaacgacggtgggg

SEQ ID NO: 15121 - DNA, 31 bp, Artificial Sequence
  Description of Artificial Sequence:  Nucleic Acid
  misc_feature: DNAzyme
ttttggtgggctagctacaacgaggaaagtc

SEQ ID NO: 15122 - DNA, 31 bp, Artificial Sequence
  Description of Artificial Sequence:  Nucleic Acid
  misc_feature: DNAzyme
cattttggggctagctacaacgagcggaaag

SEQ ID NO: 15123 - DNA, 31 bp, Artificial Sequence
  Description of Artificial Sequence:  Nucleic Acid
  misc_feature: DNAzyme
tgaatgcaggctagctacaacgatttggtgc

SEQ ID NO: 15124 - DNA, 31 bp, Artificial Sequence
  Description of Artificial Sequence:  Nucleic Acid
  misc_feature: DNAzyme
cgtgaatgggctagctacaacgaattttggt

SEQ ID NO: 15125 - DNA, 31 bp, Artificial Sequence
  Description of Artificial Sequence:  Nucleic Acid
  misc_feature: DNAzyme
tccgtgaaggctagctacaacgagcattttg

SEQ ID NO: 15126 - DNA, 31 bp, Artificial Sequence
  Description of Artificial Sequence:  Nucleic Acid
  misc_feature: DNAzyme
gtcatccgggctagctacaacgagaatgcat

SEQ ID NO: 15127 - DNA, 31 bp, Artificial Sequence
  Description of Artificial Sequence:  Nucleic Acid
  misc_feature: DNAzyme
aggggtcaggctagctacaacgaccgtgaat

SEQ ID NO: 15128 - DNA, 31 bp, Artificial Sequence
  Description of Artificial Sequence:  Nucleic Acid
  misc_feature: DNAzyme
tcaaggggggctagctacaacgacatccgtg

SEQ ID NO: 15129 - DNA, 31 bp, Artificial Sequence
  Description of Artificial Sequence:  Nucleic Acid
  misc_feature: DNAzyme
tgtgcgggggctagctacaacgatcaagggg

SEQ ID NO: 15130 - DNA, 31 bp, Artificial Sequence
  Description of Artificial Sequence:  Nucleic Acid
  misc_feature: DNAzyme
actttgtgggctagctacaacgagggctcaa

SEQ ID NO: 15131 - DNA, 31 bp, Artificial Sequence
  Description of Artificial Sequence:  Nucleic Acid
  misc_feature: DNAzyme
ggactttgggctagctacaacgagcgggctc

SEQ ID NO: 15132 - DNA, 31 bp, Artificial Sequence
  Description of Artificial Sequence:  Nucleic Acid
  misc_feature: DNAzyme
gtgccggaggctagctacaacgatttgtgcg

SEQ ID NO: 15133 - DNA, 31 bp, Artificial Sequence
  Description of Artificial Sequence:  Nucleic Acid
  misc_feature: DNAzyme
caaaagtgggctagctacaacgacggacttt

SEQ ID NO: 15134 - DNA, 31 bp, Artificial Sequence
  Description of Artificial Sequence:  Nucleic Acid
  misc_feature: DNAzyme
agcaaaagggctagctacaacgagccggact

SEQ ID NO: 15135 - DNA, 31 bp, Artificial Sequence
  Description of Artificial Sequence:  Nucleic Acid
  misc_feature: DNAzyme
tggtatagggctagctacaacgaaaaagtgc

SEQ ID NO: 15136 - DNA, 31 bp, Artificial Sequence
  Description of Artificial Sequence:  Nucleic Acid
  misc_feature: DNAzyme
ggctggtaggctagctacaacgaagcaaaag

SEQ ID NO: 15137 - DNA, 31 bp, Artificial Sequence
  Description of Artificial Sequence:  Nucleic Acid
  misc_feature: DNAzyme
caggctggggctagctacaacgaatagcaaa

SEQ ID NO: 15138 - DNA, 31 bp, Artificial Sequence
  Description of Artificial Sequence:  Nucleic Acid
  misc_feature: DNAzyme
gctccaggggctagctacaacgatggtatag

SEQ ID NO: 15139 - DNA, 31 bp, Artificial Sequence
  Description of Artificial Sequence:  Nucleic Acid
  misc_feature: DNAzyme
tcatggtgggctagctacaacgatccaggct

SEQ ID NO: 15140 - DNA, 31 bp, Artificial Sequence
  Description of Artificial Sequence:  Nucleic Acid
  misc_feature: DNAzyme
gctcatggggctagctacaacgagctccagg

SEQ ID NO: 15141 - DNA, 31 bp, Artificial Sequence
  Description of Artificial Sequence:  Nucleic Acid
  misc_feature: DNAzyme
cccgctcaggctagctacaacgaggtgctcc

SEQ ID NO: 15142 - DNA, 31 bp, Artificial Sequence
  Description of Artificial Sequence:  Nucleic Acid
  misc_feature: DNAzyme
tcggcccgggctagctacaacgatcatggtg

SEQ ID NO: 15143 - DNA, 31 bp, Artificial Sequence
  Description of Artificial Sequence:  Nucleic Acid
  misc_feature: DNAzyme
atactcggggctagctacaacgaccgctcat

SEQ ID NO: 15144 - DNA, 31 bp, Artificial Sequence
  Description of Artificial Sequence:  Nucleic Acid
  misc_feature: DNAzyme
tcgccataggctagctacaacgatcggcccg

SEQ ID NO: 15145 - DNA, 31 bp, Artificial Sequence
  Description of Artificial Sequence:  Nucleic Acid
  misc_feature: DNAzyme
gctcgccaggctagctacaacgaactcggcc

SEQ ID NO: 15146 - DNA, 31 bp, Artificial Sequence
  Description of Artificial Sequence:  Nucleic Acid
  misc_feature: DNAzyme
tatgctcgggctagctacaacgacatactcg

SEQ ID NO: 15147 - DNA, 31 bp, Artificial Sequence
  Description of Artificial Sequence:  Nucleic Acid
  misc_feature: DNAzyme
aaattatgggctagctacaacgatcgccata

SEQ ID NO: 15148 - DNA, 31 bp, Artificial Sequence
  Description of Artificial Sequence:  Nucleic Acid
  misc_feature: DNAzyme
caaaattaggctagctacaacgagctcgcca

SEQ ID NO: 15149 - DNA, 31 bp, Artificial Sequence
  Description of Artificial Sequence:  Nucleic Acid
  misc_feature: DNAzyme
caccaaaaggctagctacaacgatatgctcg

SEQ ID NO: 15150 - DNA, 31 bp, Artificial Sequence
  Description of Artificial Sequence:  Nucleic Acid
  misc_feature: DNAzyme
tgacatcaggctagctacaacgacaaaatta

SEQ ID NO: 15151 - DNA, 31 bp, Artificial Sequence
  Description of Artificial Sequence:  Nucleic Acid
  misc_feature: DNAzyme
ctttgacaggctagctacaacgacaccaaaa

SEQ ID NO: 15152 - DNA, 31 bp, Artificial Sequence
  Description of Artificial Sequence:  Nucleic Acid
  misc_feature: DNAzyme
atctttgaggctagctacaacgaatcaccaa

SEQ ID NO: 15153 - DNA, 31 bp, Artificial Sequence
  Description of Artificial Sequence:  Nucleic Acid
  misc_feature: DNAzyme
agagctaaggctagctacaacgactttgaca

SEQ ID NO: 15154 - DNA, 31 bp, Artificial Sequence
  Description of Artificial Sequence:  Nucleic Acid
  misc_feature: DNAzyme
acccagagggctagctacaacgataatcttt

SEQ ID NO: 15155 - DNA, 31 bp, Artificial Sequence
  Description of Artificial Sequence:  Nucleic Acid
  misc_feature: DNAzyme
gtggtccaggctagctacaacgaccagagct

SEQ ID NO: 15156 - DNA, 31 bp, Artificial Sequence
  Description of Artificial Sequence:  Nucleic Acid
  misc_feature: DNAzyme
gtgtgtggggctagctacaacgaccacccag

SEQ ID NO: 15157 - DNA, 31 bp, Artificial Sequence
  Description of Artificial Sequence:  Nucleic Acid
  misc_feature: DNAzyme
cacgtgtgggctagctacaacgaggtccacc

SEQ ID NO: 15158 - DNA, 31 bp, Artificial Sequence
  Description of Artificial Sequence:  Nucleic Acid
  misc_feature: DNAzyme
ctcacgtgggctagctacaacgagtggtcca

SEQ ID NO: 15159 - DNA, 31 bp, Artificial Sequence
  Description of Artificial Sequence:  Nucleic Acid
  misc_feature: DNAzyme
tcctcacgggctagctacaacgagtgtggtc

SEQ ID NO: 15160 - DNA, 31 bp, Artificial Sequence
  Description of Artificial Sequence:  Nucleic Acid
  misc_feature: DNAzyme
tctcctcaggctagctacaacgagtgtgtgg

SEQ ID NO: 15161 - DNA, 31 bp, Artificial Sequence
  Description of Artificial Sequence:  Nucleic Acid
  misc_feature: DNAzyme
tgccatcaggctagctacaacgatctcctca

SEQ ID NO: 15162 - DNA, 31 bp, Artificial Sequence
  Description of Artificial Sequence:  Nucleic Acid
  misc_feature: DNAzyme
cggtgccaggctagctacaacgacattctcc

SEQ ID NO: 15163 - DNA, 31 bp, Artificial Sequence
  Description of Artificial Sequence:  Nucleic Acid
  misc_feature: DNAzyme
gcgcggtgggctagctacaacgacatcattc

SEQ ID NO: 15164 - DNA, 31 bp, Artificial Sequence
  Description of Artificial Sequence:  Nucleic Acid
  misc_feature: DNAzyme
gggcgcggggctagctacaacgagccatcat

SEQ ID NO: 15165 - DNA, 31 bp, Artificial Sequence
  Description of Artificial Sequence:  Nucleic Acid
  misc_feature: DNAzyme
ggggggcgggctagctacaacgaggtgccat

SEQ ID NO: 15166 - DNA, 31 bp, Artificial Sequence
  Description of Artificial Sequence:  Nucleic Acid
  misc_feature: DNAzyme
ggggggggggctagctacaacgagcggtgcc

SEQ ID NO: 15167 - DNA, 31 bp, Artificial Sequence
  Description of Artificial Sequence:  Nucleic Acid
  misc_feature: DNAzyme
cctcaacgggctagctacaacgatcgggggg

SEQ ID NO: 15168 - DNA, 31 bp, Artificial Sequence
  Description of Artificial Sequence:  Nucleic Acid
  misc_feature: DNAzyme
cccctcaaggctagctacaacgagttcgggg

SEQ ID NO: 15169 - DNA, 31 bp, Artificial Sequence
  Description of Artificial Sequence:  Nucleic Acid
  misc_feature: DNAzyme
agtgtggaggctagctacaacgacccccccc

SEQ ID NO: 15170 - DNA, 31 bp, Artificial Sequence
  Description of Artificial Sequence:  Nucleic Acid
  misc_feature: DNAzyme
tgcaagtgggctagctacaacgaggatcccc

SEQ ID NO: 15171 - DNA, 31 bp, Artificial Sequence
  Description of Artificial Sequence:  Nucleic Acid
  misc_feature: DNAzyme
gttgcaagggctagctacaacgagtggatcc

SEQ ID NO: 15172 - DNA, 31 bp, Artificial Sequence
  Description of Artificial Sequence:  Nucleic Acid
  misc_feature: DNAzyme
cgcagttgggctagctacaacgaaagtgtgg

SEQ ID NO: 15173 - DNA, 31 bp, Artificial Sequence
  Description of Artificial Sequence:  Nucleic Acid
  misc_feature: DNAzyme
aggcgcagggctagctacaacgatgcaagtg

SEQ ID NO: 15174 - DNA, 31 bp, Artificial Sequence
  Description of Artificial Sequence:  Nucleic Acid
  misc_feature: DNAzyme
ccgaggcgggctagctacaacgaagttgcaa

SEQ ID NO: 15175 - DNA, 31 bp, Artificial Sequence
  Description of Artificial Sequence:  Nucleic Acid
  misc_feature: DNAzyme
agccgaggggctagctacaacgagcagttgc

SEQ ID NO: 15176 - DNA, 31 bp, Artificial Sequence
  Description of Artificial Sequence:  Nucleic Acid
  misc_feature: DNAzyme
caccagagggctagctacaacgacgaggcgc

SEQ ID NO: 15177 - DNA, 31 bp, Artificial Sequence
  Description of Artificial Sequence:  Nucleic Acid
  misc_feature: DNAzyme
ccttatcaggctagctacaacgacagagccg

SEQ ID NO: 15178 - DNA, 31 bp, Artificial Sequence
  Description of Artificial Sequence:  Nucleic Acid
  misc_feature: DNAzyme
ataccttaggctagctacaacgacaccagag

SEQ ID NO: 15179 - DNA, 31 bp, Artificial Sequence
  Description of Artificial Sequence:  Nucleic Acid
  misc_feature: DNAzyme
ttgcaataggctagctacaacgacttatcac

SEQ ID NO: 15180 - DNA, 31 bp, Artificial Sequence
  Description of Artificial Sequence:  Nucleic Acid
  misc_feature: DNAzyme
ggttgcaaggctagctacaacgaaccttatc

SEQ ID NO: 15181 - DNA, 31 bp, Artificial Sequence
  Description of Artificial Sequence:  Nucleic Acid
  misc_feature: DNAzyme
ggtggttgggctagctacaacgaaatacctt

SEQ ID NO: 15182 - DNA, 31 bp, Artificial Sequence
  Description of Artificial Sequence:  Nucleic Acid
  misc_feature: DNAzyme
tatggtggggctagctacaacgatgcaatac

SEQ ID NO: 15183 - DNA, 31 bp, Artificial Sequence
  Description of Artificial Sequence:  Nucleic Acid
  misc_feature: DNAzyme
tcatatggggctagctacaacgaggttgcaa

SEQ ID NO: 15184 - DNA, 31 bp, Artificial Sequence
  Description of Artificial Sequence:  Nucleic Acid
  misc_feature: DNAzyme
ggctcataggctagctacaacgaggtggttg

SEQ ID NO: 15185 - DNA, 31 bp, Artificial Sequence
  Description of Artificial Sequence:  Nucleic Acid
  misc_feature: DNAzyme
taggctcaggctagctacaacgaatggtggt

SEQ ID NO: 15186 - DNA, 31 bp, Artificial Sequence
  Description of Artificial Sequence:  Nucleic Acid
  misc_feature: DNAzyme
tcgctaggggctagctacaacgatcatatgg

SEQ ID NO: 15187 - DNA, 31 bp, Artificial Sequence
  Description of Artificial Sequence:  Nucleic Acid
  misc_feature: DNAzyme
gttcctcgggctagctacaacgataggctca

SEQ ID NO: 15188 - DNA, 31 bp, Artificial Sequence
  Description of Artificial Sequence:  Nucleic Acid
  misc_feature: DNAzyme
acaaagtgggctagctacaacgatcctcgct

SEQ ID NO: 15189 - DNA, 31 bp, Artificial Sequence
  Description of Artificial Sequence:  Nucleic Acid
  misc_feature: DNAzyme
ctacaaagggctagctacaacgagttcctcg

SEQ ID NO: 15190 - DNA, 31 bp, Artificial Sequence
  Description of Artificial Sequence:  Nucleic Acid
  misc_feature: DNAzyme
ccatactaggctagctacaacgaaaagtgtt

SEQ ID NO: 15191 - DNA, 31 bp, Artificial Sequence
  Description of Artificial Sequence:  Nucleic Acid
  misc_feature: DNAzyme
tcaccataggctagctacaacgatacaaagt

SEQ ID NO: 15192 - DNA, 31 bp, Artificial Sequence
  Description of Artificial Sequence:  Nucleic Acid
  misc_feature: DNAzyme
tgtcaccaggctagctacaacgaactacaaa

SEQ ID NO: 15193 - DNA, 31 bp, Artificial Sequence
  Description of Artificial Sequence:  Nucleic Acid
  misc_feature: DNAzyme
ccttgtcaggctagctacaacgacatactac

SEQ ID NO: 15194 - DNA, 31 bp, Artificial Sequence
  Description of Artificial Sequence:  Nucleic Acid
  misc_feature: DNAzyme
tgaccttgggctagctacaacgacaccatac

SEQ ID NO: 15195 - DNA, 31 bp, Artificial Sequence
  Description of Artificial Sequence:  Nucleic Acid
  misc_feature: DNAzyme
actcttgaggctagctacaacgacttgtcac

SEQ ID NO: 15196 - DNA, 31 bp, Artificial Sequence
  Description of Artificial Sequence:  Nucleic Acid
  misc_feature: DNAzyme
gtctagcaggctagctacaacgatcttgacc

SEQ ID NO: 15197 - DNA, 31 bp, Artificial Sequence
  Description of Artificial Sequence:  Nucleic Acid
  misc_feature: DNAzyme
aggtctagggctagctacaacgaactcttga

SEQ ID NO: 15198 - DNA, 31 bp, Artificial Sequence
  Description of Artificial Sequence:  Nucleic Acid
  misc_feature: DNAzyme
tttgtaggggctagctacaacgactagcact

SEQ ID NO: 15199 - DNA, 31 bp, Artificial Sequence
  Description of Artificial Sequence:  Nucleic Acid
  misc_feature: DNAzyme
ggtttttgggctagctacaacgaaggtctag

SEQ ID NO: 15200 - DNA, 31 bp, Artificial Sequence
  Description of Artificial Sequence:  Nucleic Acid
  misc_feature: DNAzyme
aggcgtggggctagctacaacgattttgtag

SEQ ID NO: 15201 - DNA, 31 bp, Artificial Sequence
  Description of Artificial Sequence:  Nucleic Acid
  misc_feature: DNAzyme
cggaggcgggctagctacaacgaggtttttg

SEQ ID NO: 15202 - DNA, 31 bp, Artificial Sequence
  Description of Artificial Sequence:  Nucleic Acid
  misc_feature: DNAzyme
tgcggaggggctagctacaacgagtggtttt

SEQ ID NO: 15203 - DNA, 31 bp, Artificial Sequence
  Description of Artificial Sequence:  Nucleic Acid
  misc_feature: DNAzyme
gcatcgtgggctagctacaacgaggaggcgt

SEQ ID NO: 15204 - DNA, 31 bp, Artificial Sequence
  Description of Artificial Sequence:  Nucleic Acid
  misc_feature: DNAzyme
ccgcatcgggctagctacaacgagcggaggc

SEQ ID NO: 15205 - DNA, 31 bp, Artificial Sequence
  Description of Artificial Sequence:  Nucleic Acid
  misc_feature: DNAzyme
tggccgcaggctagctacaacgacgtgcgga

SEQ ID NO: 15206 - DNA, 31 bp, Artificial Sequence
  Description of Artificial Sequence:  Nucleic Acid
  misc_feature: DNAzyme
gatggccgggctagctacaacgaatcgtgcg

SEQ ID NO: 15207 - DNA, 31 bp, Artificial Sequence
  Description of Artificial Sequence:  Nucleic Acid
  misc_feature: DNAzyme
ggagatggggctagctacaacgacgcatcgt

SEQ ID NO: 15208 - DNA, 31 bp, Artificial Sequence
  Description of Artificial Sequence:  Nucleic Acid
  misc_feature: DNAzyme
ccgggagaggctagctacaacgaggccgcat

SEQ ID NO: 15209 - DNA, 31 bp, Artificial Sequence
  Description of Artificial Sequence:  Nucleic Acid
  misc_feature: DNAzyme
gccatggaggctagctacaacgacgggagat

SEQ ID NO: 15210 - DNA, 31 bp, Artificial Sequence
  Description of Artificial Sequence:  Nucleic Acid
  misc_feature: DNAzyme
gtacgccaggctagctacaacgaggaccggg

SEQ ID NO: 15211 - DNA, 31 bp, Artificial Sequence
  Description of Artificial Sequence:  Nucleic Acid
  misc_feature: DNAzyme
ggcgtacgggctagctacaacgacatggacc

SEQ ID NO: 15212 - DNA, 31 bp, Artificial Sequence
  Description of Artificial Sequence:  Nucleic Acid
  misc_feature: DNAzyme
cgggcgtaggctagctacaacgagccatgga

SEQ ID NO: 15213 - DNA, 31 bp, Artificial Sequence
  Description of Artificial Sequence:  Nucleic Acid
  misc_feature: DNAzyme
cacgggcgggctagctacaacgaacgccatg

SEQ ID NO: 15214 - DNA, 31 bp, Artificial Sequence
  Description of Artificial Sequence:  Nucleic Acid
  misc_feature: DNAzyme
accacgggggctagctacaacgagtacgcca

SEQ ID NO: 15215 - DNA, 31 bp, Artificial Sequence
  Description of Artificial Sequence:  Nucleic Acid
  misc_feature: DNAzyme
taccaccaggctagctacaacgagggcgtac

SEQ ID NO: 15216 - DNA, 31 bp, Artificial Sequence
  Description of Artificial Sequence:  Nucleic Acid
  misc_feature: DNAzyme
cgttaccaggctagctacaacgacacgggcg

SEQ ID NO: 15217 - DNA, 31 bp, Artificial Sequence
  Description of Artificial Sequence:  Nucleic Acid
  misc_feature: DNAzyme
tggcgttaggctagctacaacgacaccacgg

SEQ ID NO: 15218 - DNA, 31 bp, Artificial Sequence
  Description of Artificial Sequence:  Nucleic Acid
  misc_feature: DNAzyme
tgctggcgggctagctacaacgataccacca

SEQ ID NO: 15219 - DNA, 31 bp, Artificial Sequence
  Description of Artificial Sequence:  Nucleic Acid
  misc_feature: DNAzyme
cctgctggggctagctacaacgagttaccac

SEQ ID NO: 15220 - DNA, 31 bp, Artificial Sequence
  Description of Artificial Sequence:  Nucleic Acid
  misc_feature: DNAzyme
tgctcctgggctagctacaacgatggcgtta

SEQ ID NO: 15221 - DNA, 31 bp, Artificial Sequence
  Description of Artificial Sequence:  Nucleic Acid
  misc_feature: DNAzyme
tactcctgggctagctacaacgatcctgctg

SEQ ID NO: 15222 - DNA, 31 bp, Artificial Sequence
  Description of Artificial Sequence:  Nucleic Acid
  misc_feature: DNAzyme
ggccgctaggctagctacaacgatcctgctc

SEQ ID NO: 15223 - DNA, 31 bp, Artificial Sequence
  Description of Artificial Sequence:  Nucleic Acid
  misc_feature: DNAzyme
tatggccgggctagctacaacgatactcctg

SEQ ID NO: 15224 - DNA, 31 bp, Artificial Sequence
  Description of Artificial Sequence:  Nucleic Acid
  misc_feature: DNAzyme
gcgtatggggctagctacaacgacgctactc

SEQ ID NO: 15225 - DNA, 31 bp, Artificial Sequence
  Description of Artificial Sequence:  Nucleic Acid
  misc_feature: DNAzyme
acggcgtaggctagctacaacgaggccgcta

SEQ ID NO: 15226 - DNA, 31 bp, Artificial Sequence
  Description of Artificial Sequence:  Nucleic Acid
  misc_feature: DNAzyme
ctacggcgggctagctacaacgaatggccgc

SEQ ID NO: 15227 - DNA, 31 bp, Artificial Sequence
  Description of Artificial Sequence:  Nucleic Acid
  misc_feature: DNAzyme
ctctacggggctagctacaacgagtatggcc

SEQ ID NO: 15228 - DNA, 31 bp, Artificial Sequence
  Description of Artificial Sequence:  Nucleic Acid
  misc_feature: DNAzyme
gctctctaggctagctacaacgaggcgtatg

SEQ ID NO: 15229 - DNA, 31 bp, Artificial Sequence
  Description of Artificial Sequence:  Nucleic Acid
  misc_feature: DNAzyme
ggcatatgggctagctacaacgatctctacg

SEQ ID NO: 15230 - DNA, 31 bp, Artificial Sequence
  Description of Artificial Sequence:  Nucleic Acid
  misc_feature: DNAzyme
gcggcataggctagctacaacgagctctcta

SEQ ID NO: 15231 - DNA, 31 bp, Artificial Sequence
  Description of Artificial Sequence:  Nucleic Acid
  misc_feature: DNAzyme
gggcggcaggctagctacaacgaatgctctc

SEQ ID NO: 15232 - DNA, 31 bp, Artificial Sequence
  Description of Artificial Sequence:  Nucleic Acid
  misc_feature: DNAzyme
tggggcggggctagctacaacgaatatgctc

SEQ ID NO: 15233 - DNA, 31 bp, Artificial Sequence
  Description of Artificial Sequence:  Nucleic Acid
  misc_feature: DNAzyme
ccctggggggctagctacaacgaggcatatg

SEQ ID NO: 15234 - DNA, 31 bp, Artificial Sequence
  Description of Artificial Sequence:  Nucleic Acid
  misc_feature: DNAzyme
caagctggggctagctacaacgaccctgggg

SEQ ID NO: 15235 - DNA, 31 bp, Artificial Sequence
  Description of Artificial Sequence:  Nucleic Acid
  misc_feature: DNAzyme
aaggcaagggctagctacaacgatggtccct

SEQ ID NO: 15236 - DNA, 31 bp, Artificial Sequence
  Description of Artificial Sequence:  Nucleic Acid
  misc_feature: DNAzyme
atcaaaggggctagctacaacgaaagctggt

SEQ ID NO: 15237 - DNA, 31 bp, Artificial Sequence
  Description of Artificial Sequence:  Nucleic Acid
  misc_feature: DNAzyme
ctggtacaggctagctacaacgacaaaggca

SEQ ID NO: 15238 - DNA, 31 bp, Artificial Sequence
  Description of Artificial Sequence:  Nucleic Acid
  misc_feature: DNAzyme
gcctggtaggctagctacaacgaatcaaagg

SEQ ID NO: 15239 - DNA, 31 bp, Artificial Sequence
  Description of Artificial Sequence:  Nucleic Acid
  misc_feature: DNAzyme
ctgcctggggctagctacaacgaacatcaaa

SEQ ID NO: 15240 - DNA, 31 bp, Artificial Sequence
  Description of Artificial Sequence:  Nucleic Acid
  misc_feature: DNAzyme
ctgtgctgggctagctacaacgactggtaca

SEQ ID NO: 15241 - DNA, 31 bp, Artificial Sequence
  Description of Artificial Sequence:  Nucleic Acid
  misc_feature: DNAzyme
cttctgtgggctagctacaacgatgcctggt

SEQ ID NO: 15242 - DNA, 31 bp, Artificial Sequence
  Description of Artificial Sequence:  Nucleic Acid
  misc_feature: DNAzyme
ttcttctgggctagctacaacgagctgcctg

SEQ ID NO: 15243 - DNA, 31 bp, Artificial Sequence
  Description of Artificial Sequence:  Nucleic Acid
  misc_feature: DNAzyme
tcctcgtgggctagctacaacgatcttctgt

SEQ ID NO: 15244 - DNA, 31 bp, Artificial Sequence
  Description of Artificial Sequence:  Nucleic Acid
  misc_feature: DNAzyme
cttcctcgggctagctacaacgagttcttct

SEQ ID NO: 15245 - DNA, 31 bp, Artificial Sequence
  Description of Artificial Sequence:  Nucleic Acid
  misc_feature: DNAzyme
gcatggcaggctagctacaacgacctctcct

SEQ ID NO: 15246 - DNA, 31 bp, Artificial Sequence
  Description of Artificial Sequence:  Nucleic Acid
  misc_feature: DNAzyme
gtgcatggggctagctacaacgaatcctctc

SEQ ID NO: 15247 - DNA, 31 bp, Artificial Sequence
  Description of Artificial Sequence:  Nucleic Acid
  misc_feature: DNAzyme
ggagtgcaggctagctacaacgaggcatcct

SEQ ID NO: 15248 - DNA, 31 bp, Artificial Sequence
  Description of Artificial Sequence:  Nucleic Acid
  misc_feature: DNAzyme
ccggagtgggctagctacaacgaatggcatc

SEQ ID NO: 15249 - DNA, 31 bp, Artificial Sequence
  Description of Artificial Sequence:  Nucleic Acid
  misc_feature: DNAzyme
ggccggagggctagctacaacgagcatggca

SEQ ID NO: 15250 - DNA, 31 bp, Artificial Sequence
  Description of Artificial Sequence:  Nucleic Acid
  misc_feature: DNAzyme
atccttggggctagctacaacgacggagtgc

SEQ ID NO: 15251 - DNA, 31 bp, Artificial Sequence
  Description of Artificial Sequence:  Nucleic Acid
  misc_feature: DNAzyme
atgcagcaggctagctacaacgaccttggcc

SEQ ID NO: 15252 - DNA, 31 bp, Artificial Sequence
  Description of Artificial Sequence:  Nucleic Acid
  misc_feature: DNAzyme
caatgcagggctagctacaacgaatccttgg

SEQ ID NO: 15253 - DNA, 31 bp, Artificial Sequence
  Description of Artificial Sequence:  Nucleic Acid
  misc_feature: DNAzyme
cctcaatgggctagctacaacgaagcatcct

SEQ ID NO: 15254 - DNA, 31 bp, Artificial Sequence
  Description of Artificial Sequence:  Nucleic Acid
  misc_feature: DNAzyme
gtcctcaaggctagctacaacgagcagcatc

SEQ ID NO: 15255 - DNA, 31 bp, Artificial Sequence
  Description of Artificial Sequence:  Nucleic Acid
  misc_feature: DNAzyme
cctggtggggctagctacaacgacctcaatg

SEQ ID NO: 15256 - DNA, 31 bp, Artificial Sequence
  Description of Artificial Sequence:  Nucleic Acid
  misc_feature: DNAzyme
gaacctggggctagctacaacgaggtcctca

SEQ ID NO: 15257 - DNA, 31 bp, Artificial Sequence
  Description of Artificial Sequence:  Nucleic Acid
  misc_feature: DNAzyme
ctagagaaggctagctacaacgactggtggt

SEQ ID NO: 15258 - DNA, 31 bp, Artificial Sequence
  Description of Artificial Sequence:  Nucleic Acid
  misc_feature: DNAzyme
cgaggctgggctagctacaacgacctagaga

SEQ ID NO: 15259 - DNA, 31 bp, Artificial Sequence
  Description of Artificial Sequence:  Nucleic Acid
  misc_feature: DNAzyme
ggccgaggggctagctacaacgatgccctag

SEQ ID NO: 15260 - DNA, 31 bp, Artificial Sequence
  Description of Artificial Sequence:  Nucleic Acid
  misc_feature: DNAzyme
agcccaggggctagctacaacgacgaggctg

SEQ ID NO: 15261 - DNA, 31 bp, Artificial Sequence
  Description of Artificial Sequence:  Nucleic Acid
  misc_feature: DNAzyme
gttggtagggctagctacaacgaccaggccg

SEQ ID NO: 15262 - DNA, 31 bp, Artificial Sequence
  Description of Artificial Sequence:  Nucleic Acid
  misc_feature: DNAzyme
gctgttggggctagctacaacgaagcccagg

SEQ ID NO: 15263 - DNA, 31 bp, Artificial Sequence
  Description of Artificial Sequence:  Nucleic Acid
  misc_feature: DNAzyme
tgatgctgggctagctacaacgatggtagcc

SEQ ID NO: 15264 - DNA, 31 bp, Artificial Sequence
  Description of Artificial Sequence:  Nucleic Acid
  misc_feature: DNAzyme
ggatgatgggctagctacaacgatgttggta

SEQ ID NO: 15265 - DNA, 31 bp, Artificial Sequence
  Description of Artificial Sequence:  Nucleic Acid
  misc_feature: DNAzyme
gtggatgaggctagctacaacgagctgttgg

SEQ ID NO: 15266 - DNA, 31 bp, Artificial Sequence
  Description of Artificial Sequence:  Nucleic Acid
  misc_feature: DNAzyme
tttgtggaggctagctacaacgagatgctgt

SEQ ID NO: 15267 - DNA, 31 bp, Artificial Sequence
  Description of Artificial Sequence:  Nucleic Acid
  misc_feature: DNAzyme
cctgtttgggctagctacaacgaggatgatg

SEQ ID NO: 15268 - DNA, 31 bp, Artificial Sequence
  Description of Artificial Sequence:  Nucleic Acid
  misc_feature: DNAzyme
tgtgcctgggctagctacaacgattgtggat

SEQ ID NO: 15269 - DNA, 31 bp, Artificial Sequence
  Description of Artificial Sequence:  Nucleic Acid
  misc_feature: DNAzyme
cgtctgtgggctagctacaacgactgtttgt

SEQ ID NO: 15270 - DNA, 31 bp, Artificial Sequence
  Description of Artificial Sequence:  Nucleic Acid
  misc_feature: DNAzyme
cgcgtctgggctagctacaacgagcctgttt

SEQ ID NO: 15271 - DNA, 31 bp, Artificial Sequence
  Description of Artificial Sequence:  Nucleic Acid
  misc_feature: DNAzyme
cgcgcgcgggctagctacaacgactgtgcct

SEQ ID NO: 15272 - DNA, 31 bp, Artificial Sequence
  Description of Artificial Sequence:  Nucleic Acid
  misc_feature: DNAzyme
gacgcgcgggctagctacaacgagtctgtgc

SEQ ID NO: 15273 - DNA, 31 bp, Artificial Sequence
  Description of Artificial Sequence:  Nucleic Acid
  misc_feature: DNAzyme
cagacgcgggctagctacaacgagcgtctgt

SEQ ID NO: 15274 - DNA, 31 bp, Artificial Sequence
  Description of Artificial Sequence:  Nucleic Acid
  misc_feature: DNAzyme
ggcagacgggctagctacaacgagcgcgtct

SEQ ID NO: 15275 - DNA, 31 bp, Artificial Sequence
  Description of Artificial Sequence:  Nucleic Acid
  misc_feature: DNAzyme
ctggcagaggctagctacaacgagcgcgcgt

SEQ ID NO: 15276 - DNA, 31 bp, Artificial Sequence
  Description of Artificial Sequence:  Nucleic Acid
  misc_feature: DNAzyme
tctcctggggctagctacaacgaagacgcgc

SEQ ID NO: 15277 - DNA, 31 bp, Artificial Sequence
  Description of Artificial Sequence:  Nucleic Acid
  misc_feature: DNAzyme
tcctgttgggctagctacaacgattttcctt

SEQ ID NO: 15278 - DNA, 31 bp, Artificial Sequence
  Description of Artificial Sequence:  Nucleic Acid
  misc_feature: DNAzyme
atgtcctgggctagctacaacgatgcttttc

SEQ ID NO: 15279 - DNA, 31 bp, Artificial Sequence
  Description of Artificial Sequence:  Nucleic Acid
  misc_feature: DNAzyme
ggagtatgggctagctacaacgacctgttgc

SEQ ID NO: 15280 - DNA, 31 bp, Artificial Sequence
  Description of Artificial Sequence:  Nucleic Acid
  misc_feature: DNAzyme
tgggagtaggctagctacaacgagtcctgtt

SEQ ID NO: 15281 - DNA, 31 bp, Artificial Sequence
  Description of Artificial Sequence:  Nucleic Acid
  misc_feature: DNAzyme
aatgggagggctagctacaacgaatgtcctg

SEQ ID NO: 15282 - DNA, 31 bp, Artificial Sequence
  Description of Artificial Sequence:  Nucleic Acid
  misc_feature: DNAzyme
caatcaaaggctagctacaacgagggagtat

SEQ ID NO: 15283 - DNA, 31 bp, Artificial Sequence
  Description of Artificial Sequence:  Nucleic Acid
  misc_feature: DNAzyme
cttcgcaaggctagctacaacgacaaatggg

SEQ ID NO: 15284 - DNA, 31 bp, Artificial Sequence
  Description of Artificial Sequence:  Nucleic Acid
  misc_feature: DNAzyme
ctccttcgggctagctacaacgaaatcaaat

SEQ ID NO: 15285 - DNA, 31 bp, Artificial Sequence
  Description of Artificial Sequence:  Nucleic Acid
  misc_feature: DNAzyme
agcggttgggctagctacaacgactccttcg

SEQ ID NO: 15286 - DNA, 31 bp, Artificial Sequence
  Description of Artificial Sequence:  Nucleic Acid
  misc_feature: DNAzyme
gtcagcggggctagctacaacgatgtctcct

SEQ ID NO: 15287 - DNA, 31 bp, Artificial Sequence
  Description of Artificial Sequence:  Nucleic Acid
  misc_feature: DNAzyme
agggtcagggctagctacaacgaggttgtct

SEQ ID NO: 15288 - DNA, 31 bp, Artificial Sequence
  Description of Artificial Sequence:  Nucleic Acid
  misc_feature: DNAzyme
gtgtagggggctagctacaacgacagcggtt

SEQ ID NO: 15289 - DNA, 31 bp, Artificial Sequence
  Description of Artificial Sequence:  Nucleic Acid
  misc_feature: DNAzyme
gtacggtgggctagctacaacgaagggtcag

SEQ ID NO: 15290 - DNA, 31 bp, Artificial Sequence
  Description of Artificial Sequence:  Nucleic Acid
  misc_feature: DNAzyme
ctgtacggggctagctacaacgagtagggtc

SEQ ID NO: 15291 - DNA, 31 bp, Artificial Sequence
  Description of Artificial Sequence:  Nucleic Acid
  misc_feature: DNAzyme
tacctgtaggctagctacaacgaggtgtagg

SEQ ID NO: 15292 - DNA, 31 bp, Artificial Sequence
  Description of Artificial Sequence:  Nucleic Acid
  misc_feature: DNAzyme
aatacctgggctagctacaacgaacggtgta

SEQ ID NO: 15293 - DNA, 31 bp, Artificial Sequence
  Description of Artificial Sequence:  Nucleic Acid
  misc_feature: DNAzyme
gtgcaataggctagctacaacgactgtacgg

SEQ ID NO: 15294 - DNA, 31 bp, Artificial Sequence
  Description of Artificial Sequence:  Nucleic Acid
  misc_feature: DNAzyme
acgtgcaaggctagctacaacgaacctgtac

SEQ ID NO: 15295 - DNA, 31 bp, Artificial Sequence
  Description of Artificial Sequence:  Nucleic Acid
  misc_feature: DNAzyme
tggacgtgggctagctacaacgaaatacctg

SEQ ID NO: 15296 - DNA, 31 bp, Artificial Sequence
  Description of Artificial Sequence:  Nucleic Acid
  misc_feature: DNAzyme
cgtggacgggctagctacaacgagcaatacc

SEQ ID NO: 15297 - DNA, 31 bp, Artificial Sequence
  Description of Artificial Sequence:  Nucleic Acid
  misc_feature: DNAzyme
atcgtggaggctagctacaacgagtgcaata

SEQ ID NO: 15298 - DNA, 31 bp, Artificial Sequence
  Description of Artificial Sequence:  Nucleic Acid
  misc_feature: DNAzyme
gaacatcgggctagctacaacgaggacgtgc

SEQ ID NO: 15299 - DNA, 31 bp, Artificial Sequence
  Description of Artificial Sequence:  Nucleic Acid
  misc_feature: DNAzyme
ccagaacaggctagctacaacgacgtggacg

SEQ ID NO: 15300 - DNA, 31 bp, Artificial Sequence
  Description of Artificial Sequence:  Nucleic Acid
  misc_feature: DNAzyme
caccagaaggctagctacaacgaatcgtgga

SEQ ID NO: 15301 - DNA, 31 bp, Artificial Sequence
  Description of Artificial Sequence:  Nucleic Acid
  misc_feature: DNAzyme
catctccaggctagctacaacgacagaacat

SEQ ID NO: 15302 - DNA, 31 bp, Artificial Sequence
  Description of Artificial Sequence:  Nucleic Acid
  misc_feature: DNAzyme
ttgatccaggctagctacaacgactccacca

SEQ ID NO: 15303 - DNA, 31 bp, Artificial Sequence
  Description of Artificial Sequence:  Nucleic Acid
  misc_feature: DNAzyme
tggtttgaggctagctacaacgaccatctcc

SEQ ID NO: 15304 - DNA, 31 bp, Artificial Sequence
  Description of Artificial Sequence:  Nucleic Acid
  misc_feature: DNAzyme
tccactggggctagctacaacgattgatcca

SEQ ID NO: 15305 - DNA, 31 bp, Artificial Sequence
  Description of Artificial Sequence:  Nucleic Acid
  misc_feature: DNAzyme
tctgtccaggctagctacaacgatggtttga

SEQ ID NO: 15306 - DNA, 31 bp, Artificial Sequence
  Description of Artificial Sequence:  Nucleic Acid
  misc_feature: DNAzyme
cggctctgggctagctacaacgaccactggt

SEQ ID NO: 15307 - DNA, 31 bp, Artificial Sequence
  Description of Artificial Sequence:  Nucleic Acid
  misc_feature: DNAzyme
cctaccggggctagctacaacgatctgtcca

SEQ ID NO: 15308 - DNA, 31 bp, Artificial Sequence
  Description of Artificial Sequence:  Nucleic Acid
  misc_feature: DNAzyme
ccaccctaggctagctacaacgacggctctg

SEQ ID NO: 15309 - DNA, 31 bp, Artificial Sequence
  Description of Artificial Sequence:  Nucleic Acid
  misc_feature: DNAzyme
cttcaccaggctagctacaacgacctaccgg

SEQ ID NO: 15310 - DNA, 31 bp, Artificial Sequence
  Description of Artificial Sequence:  Nucleic Acid
  misc_feature: DNAzyme
ctccttcaggctagctacaacgacaccctac

SEQ ID NO: 15311 - DNA, 31 bp, Artificial Sequence
  Description of Artificial Sequence:  Nucleic Acid
  misc_feature: DNAzyme
ctgccctgggctagctacaacgatccttcac

SEQ ID NO: 15312 - DNA, 31 bp, Artificial Sequence
  Description of Artificial Sequence:  Nucleic Acid
  misc_feature: DNAzyme
aaatactgggctagctacaacgacctgctcc

SEQ ID NO: 15313 - DNA, 31 bp, Artificial Sequence
  Description of Artificial Sequence:  Nucleic Acid
  misc_feature: DNAzyme
ggcaaataggctagctacaacgatgccctgc

SEQ ID NO: 15314 - DNA, 31 bp, Artificial Sequence
  Description of Artificial Sequence:  Nucleic Acid
  misc_feature: DNAzyme
gtggcaaaggctagctacaacgaactgccct

SEQ ID NO: 15315 - DNA, 31 bp, Artificial Sequence
  Description of Artificial Sequence:  Nucleic Acid
  misc_feature: DNAzyme
cagagtggggctagctacaacgaaaatactg

SEQ ID NO: 15316 - DNA, 31 bp, Artificial Sequence
  Description of Artificial Sequence:  Nucleic Acid
  misc_feature: DNAzyme
ctacagagggctagctacaacgaggcaaata

SEQ ID NO: 15317 - DNA, 31 bp, Artificial Sequence
  Description of Artificial Sequence:  Nucleic Acid
  misc_feature: DNAzyme
gtccactaggctagctacaacgaagagtggc

SEQ ID NO: 15318 - DNA, 31 bp, Artificial Sequence
  Description of Artificial Sequence:  Nucleic Acid
  misc_feature: DNAzyme
gttgtccaggctagctacaacgatacagagt

SEQ ID NO: 15319 - DNA, 31 bp, Artificial Sequence
  Description of Artificial Sequence:  Nucleic Acid
  misc_feature: DNAzyme
tgctgttgggctagctacaacgaccactaca

SEQ ID NO: 15320 - DNA, 31 bp, Artificial Sequence
  Description of Artificial Sequence:  Nucleic Acid
  misc_feature: DNAzyme
cgctgctgggctagctacaacgatgtccact

SEQ ID NO: 15321 - DNA, 31 bp, Artificial Sequence
  Description of Artificial Sequence:  Nucleic Acid
  misc_feature: DNAzyme
gcccgctgggctagctacaacgatgttgtcc

SEQ ID NO: 15322 - DNA, 31 bp, Artificial Sequence
  Description of Artificial Sequence:  Nucleic Acid
  misc_feature: DNAzyme
tcagcccgggctagctacaacgatgctgttg

SEQ ID NO: 15323 - DNA, 31 bp, Artificial Sequence
  Description of Artificial Sequence:  Nucleic Acid
  misc_feature: DNAzyme
gagctcagggctagctacaacgaccgctgct

SEQ ID NO: 15324 - DNA, 31 bp, Artificial Sequence
  Description of Artificial Sequence:  Nucleic Acid
  misc_feature: DNAzyme
gatcagagggctagctacaacgatcagcccg

SEQ ID NO: 15325 - DNA, 31 bp, Artificial Sequence
  Description of Artificial Sequence:  Nucleic Acid
  misc_feature: DNAzyme
gggacagaggctagctacaacgacagagctc

SEQ ID NO: 15326 - DNA, 31 bp, Artificial Sequence
  Description of Artificial Sequence:  Nucleic Acid
  misc_feature: DNAzyme
gacagggaggctagctacaacgaagatcaga

SEQ ID NO: 15327 - DNA, 31 bp, Artificial Sequence
  Description of Artificial Sequence:  Nucleic Acid
  misc_feature: DNAzyme
ttggaggaggctagctacaacgaagggacag

SEQ ID NO: 15328 - DNA, 31 bp, Artificial Sequence
  Description of Artificial Sequence:  Nucleic Acid
  misc_feature: DNAzyme
cgttgtgaggctagctacaacgattggagga

SEQ ID NO: 15329 - DNA, 31 bp, Artificial Sequence
  Description of Artificial Sequence:  Nucleic Acid
  misc_feature: DNAzyme
gagcgttgggctagctacaacgagatttgga

SEQ ID NO: 15330 - DNA, 31 bp, Artificial Sequence
  Description of Artificial Sequence:  Nucleic Acid
  misc_feature: DNAzyme
ggagagcgggctagctacaacgatgtgattt

SEQ ID NO: 15331 - DNA, 31 bp, Artificial Sequence
  Description of Artificial Sequence:  Nucleic Acid
  misc_feature: DNAzyme
gaggagagggctagctacaacgagttgtgat

SEQ ID NO: 15332 - DNA, 31 bp, Artificial Sequence
  Description of Artificial Sequence:  Nucleic Acid
  misc_feature: DNAzyme
caattggaggctagctacaacgatcgaggag

SEQ ID NO: 15333 - DNA, 31 bp, Artificial Sequence
  Description of Artificial Sequence:  Nucleic Acid
  misc_feature: DNAzyme
gcatgcaaggctagctacaacgatggactcg

SEQ ID NO: 15334 - DNA, 31 bp, Artificial Sequence
  Description of Artificial Sequence:  Nucleic Acid
  misc_feature: DNAzyme
gccgcatgggctagctacaacgaaattggac

SEQ ID NO: 15335 - DNA, 31 bp, Artificial Sequence
  Description of Artificial Sequence:  Nucleic Acid
  misc_feature: DNAzyme
ccgccgcaggctagctacaacgagcaattgg

SEQ ID NO: 15336 - DNA, 31 bp, Artificial Sequence
  Description of Artificial Sequence:  Nucleic Acid
  misc_feature: DNAzyme
caccgccgggctagctacaacgaatgcaatt

SEQ ID NO: 15337 - DNA, 31 bp, Artificial Sequence
  Description of Artificial Sequence:  Nucleic Acid
  misc_feature: DNAzyme
gctcaccgggctagctacaacgacgcatgca

SEQ ID NO: 15338 - DNA, 31 bp, Artificial Sequence
  Description of Artificial Sequence:  Nucleic Acid
  misc_feature: DNAzyme
caggctcaggctagctacaacgacgccgcat

SEQ ID NO: 15339 - DNA, 31 bp, Artificial Sequence
  Description of Artificial Sequence:  Nucleic Acid
  misc_feature: DNAzyme
agcacaggggctagctacaacgatcaccgcc

SEQ ID NO: 15340 - DNA, 31 bp, Artificial Sequence
  Description of Artificial Sequence:  Nucleic Acid
  misc_feature: DNAzyme
gtggagcaggctagctacaacgaaggctcac

SEQ ID NO: 15341 - DNA, 31 bp, Artificial Sequence
  Description of Artificial Sequence:  Nucleic Acid
  misc_feature: DNAzyme
gcgtggagggctagctacaacgaacaggctc

SEQ ID NO: 15342 - DNA, 31 bp, Artificial Sequence
  Description of Artificial Sequence:  Nucleic Acid
  misc_feature: DNAzyme
ggggggcgggctagctacaacgaggagcaca

SEQ ID NO: 15343 - DNA, 31 bp, Artificial Sequence
  Description of Artificial Sequence:  Nucleic Acid
  misc_feature: DNAzyme
gtggggggggctagctacaacgagtggagca

SEQ ID NO: 15344 - DNA, 31 bp, Artificial Sequence
  Description of Artificial Sequence:  Nucleic Acid
  misc_feature: DNAzyme
gatgtatgggctagctacaacgaggggggcg

SEQ ID NO: 15345 - DNA, 31 bp, Artificial Sequence
  Description of Artificial Sequence:  Nucleic Acid
  misc_feature: DNAzyme
aggatgtaggctagctacaacgagtgggggg

SEQ ID NO: 15346 - DNA, 31 bp, Artificial Sequence
  Description of Artificial Sequence:  Nucleic Acid
  misc_feature: DNAzyme
ttaggatgggctagctacaacgaatgtgggg

SEQ ID NO: 15347 - DNA, 31 bp, Artificial Sequence
  Description of Artificial Sequence:  Nucleic Acid
  misc_feature: DNAzyme
ggttaggaggctagctacaacgagtatgtgg

SEQ ID NO: 15348 - DNA, 31 bp, Artificial Sequence
  Description of Artificial Sequence:  Nucleic Acid
  misc_feature: DNAzyme
ctttaaggggctagctacaacgataggatgt

SEQ ID NO: 15349 - DNA, 31 bp, Artificial Sequence
  Description of Artificial Sequence:  Nucleic Acid
  misc_feature: DNAzyme
tttttccaggctagctacaacgactttaagg

SEQ ID NO: 15350 - DNA, 31 bp, Artificial Sequence
  Description of Artificial Sequence:  Nucleic Acid
  misc_feature: DNAzyme
actgtcaaggctagctacaacgattttccat

SEQ ID NO: 15351 - DNA, 31 bp, Artificial Sequence
  Description of Artificial Sequence:  Nucleic Acid
  misc_feature: DNAzyme
ctgcactgggctagctacaacgacaattttt

SEQ ID NO: 15352 - DNA, 31 bp, Artificial Sequence
  Description of Artificial Sequence:  Nucleic Acid
  misc_feature: DNAzyme
cccctgcaggctagctacaacgatgtcaatt

SEQ ID NO: 15353 - DNA, 31 bp, Artificial Sequence
  Description of Artificial Sequence:  Nucleic Acid
  misc_feature: DNAzyme
tacccctgggctagctacaacgaactgtcaa

SEQ ID NO: 15354 - DNA, 31 bp, Artificial Sequence
  Description of Artificial Sequence:  Nucleic Acid
  misc_feature: DNAzyme
tggcactaggctagctacaacgaccctgcac

SEQ ID NO: 15355 - DNA, 31 bp, Artificial Sequence
  Description of Artificial Sequence:  Nucleic Acid
  misc_feature: DNAzyme
ctttggcaggctagctacaacgatacccctg

SEQ ID NO: 15356 - DNA, 31 bp, Artificial Sequence
  Description of Artificial Sequence:  Nucleic Acid
  misc_feature: DNAzyme
ggctttggggctagctacaacgaactacccc

SEQ ID NO: 15357 - DNA, 31 bp, Artificial Sequence
  Description of Artificial Sequence:  Nucleic Acid
  misc_feature: DNAzyme
catacaggggctagctacaacgatttggcac

SEQ ID NO: 15358 - DNA, 31 bp, Artificial Sequence
  Description of Artificial Sequence:  Nucleic Acid
  misc_feature: DNAzyme
tacccataggctagctacaacgaaggctttg

SEQ ID NO: 15359 - DNA, 31 bp, Artificial Sequence
  Description of Artificial Sequence:  Nucleic Acid
  misc_feature: DNAzyme
actacccaggctagctacaacgaacaggctt

SEQ ID NO: 15360 - DNA, 31 bp, Artificial Sequence
  Description of Artificial Sequence:  Nucleic Acid
  misc_feature: DNAzyme
gttgactaggctagctacaacgaccatacag

SEQ ID NO: 15361 - DNA, 31 bp, Artificial Sequence
  Description of Artificial Sequence:  Nucleic Acid
  misc_feature: DNAzyme
atagttgaggctagctacaacgatacccata

SEQ ID NO: 15362 - DNA, 31 bp, Artificial Sequence
  Description of Artificial Sequence:  Nucleic Acid
  misc_feature: DNAzyme
atgcatagggctagctacaacgatgactacc

SEQ ID NO: 15363 - DNA, 31 bp, Artificial Sequence
  Description of Artificial Sequence:  Nucleic Acid
  misc_feature: DNAzyme
tagatgcaggctagctacaacgaagttgact

SEQ ID NO: 15364 - DNA, 31 bp, Artificial Sequence
  Description of Artificial Sequence:  Nucleic Acid
  misc_feature: DNAzyme
cctagatgggctagctacaacgaatagttga

SEQ ID NO: 15365 - DNA, 31 bp, Artificial Sequence
  Description of Artificial Sequence:  Nucleic Acid
  misc_feature: DNAzyme
cacctagaggctagctacaacgagcatagtt

SEQ ID NO: 15366 - DNA, 31 bp, Artificial Sequence
  Description of Artificial Sequence:  Nucleic Acid
  misc_feature: DNAzyme
ggttaacaggctagctacaacgactagatgc

SEQ ID NO: 15367 - DNA, 31 bp, Artificial Sequence
  Description of Artificial Sequence:  Nucleic Acid
  misc_feature: DNAzyme
ttggttaaggctagctacaacgaacctagat

SEQ ID NO: 15368 - DNA, 31 bp, Artificial Sequence
  Description of Artificial Sequence:  Nucleic Acid
  misc_feature: DNAzyme
ggccttggggctagctacaacgataacacct

SEQ ID NO: 15369 - DNA, 31 bp, Artificial Sequence
  Description of Artificial Sequence:  Nucleic Acid
  misc_feature: DNAzyme
gttcggggggctagctacaacgacttggtta

SEQ ID NO: 15370 - DNA, 31 bp, Artificial Sequence
  Description of Artificial Sequence:  Nucleic Acid
  misc_feature: DNAzyme
aagtgcggggctagctacaacgatcggggcc

SEQ ID NO: 15371 - DNA, 31 bp, Artificial Sequence
  Description of Artificial Sequence:  Nucleic Acid
  misc_feature: DNAzyme
gcaaagtgggctagctacaacgaggttcggg

SEQ ID NO: 15372 - DNA, 31 bp, Artificial Sequence
  Description of Artificial Sequence:  Nucleic Acid
  misc_feature: DNAzyme
acgcaaagggctagctacaacgagcggttcg

SEQ ID NO: 15373 - DNA, 31 bp, Artificial Sequence
  Description of Artificial Sequence:  Nucleic Acid
  misc_feature: DNAzyme
cacttacgggctagctacaacgaaaagtgcg

SEQ ID NO: 15374 - DNA, 31 bp, Artificial Sequence
  Description of Artificial Sequence:  Nucleic Acid
  misc_feature: DNAzyme
gccacttaggctagctacaacgagcaaagtg

SEQ ID NO: 15375 - DNA, 31 bp, Artificial Sequence
  Description of Artificial Sequence:  Nucleic Acid
  misc_feature: DNAzyme
cgaggccaggctagctacaacgattacgcaa

SEQ ID NO: 15376 - DNA, 31 bp, Artificial Sequence
  Description of Artificial Sequence:  Nucleic Acid
  misc_feature: DNAzyme
ccccgaggggctagctacaacgacacttacg

SEQ ID NO: 15377 - DNA, 31 bp, Artificial Sequence
  Description of Artificial Sequence:  Nucleic Acid
  misc_feature: DNAzyme
cggaagcaggctagctacaacgacccgaggc

SEQ ID NO: 15378 - DNA, 31 bp, Artificial Sequence
  Description of Artificial Sequence:  Nucleic Acid
  misc_feature: DNAzyme
tccggaagggctagctacaacgaaccccgag

SEQ ID NO: 15379 - DNA, 31 bp, Artificial Sequence
  Description of Artificial Sequence:  Nucleic Acid
  misc_feature: DNAzyme
acggactgggctagctacaacgattccggaa

SEQ ID NO: 15380 - DNA, 31 bp, Artificial Sequence
  Description of Artificial Sequence:  Nucleic Acid
  misc_feature: DNAzyme
cccacggaggctagctacaacgatgcttccg

SEQ ID NO: 15381 - DNA, 31 bp, Artificial Sequence
  Description of Artificial Sequence:  Nucleic Acid
  misc_feature: DNAzyme
ctgccccaggctagctacaacgaggactgct

SEQ ID NO: 15382 - DNA, 31 bp, Artificial Sequence
  Description of Artificial Sequence:  Nucleic Acid
  misc_feature: DNAzyme
ttaacctgggctagctacaacgacccacgga

SEQ ID NO: 15383 - DNA, 31 bp, Artificial Sequence
  Description of Artificial Sequence:  Nucleic Acid
  misc_feature: DNAzyme
caccttaaggctagctacaacgactgcccca

SEQ ID NO: 15384 - DNA, 31 bp, Artificial Sequence
  Description of Artificial Sequence:  Nucleic Acid
  misc_feature: DNAzyme
taacgacaggctagctacaacgacttaacct

SEQ ID NO: 15385 - DNA, 31 bp, Artificial Sequence
  Description of Artificial Sequence:  Nucleic Acid
  misc_feature: DNAzyme
ggtaacgaggctagctacaacgaaccttaac

SEQ ID NO: 15386 - DNA, 31 bp, Artificial Sequence
  Description of Artificial Sequence:  Nucleic Acid
  misc_feature: DNAzyme
gccggtaaggctagctacaacgagacacctt

SEQ ID NO: 15387 - DNA, 31 bp, Artificial Sequence
  Description of Artificial Sequence:  Nucleic Acid
  misc_feature: DNAzyme
ggggccggggctagctacaacgaaacgacac

SEQ ID NO: 15388 - DNA, 31 bp, Artificial Sequence
  Description of Artificial Sequence:  Nucleic Acid
  misc_feature: DNAzyme
cgggggggggctagctacaacgacggtaacg

SEQ ID NO: 15389 - DNA, 31 bp, Artificial Sequence
  Description of Artificial Sequence:  Nucleic Acid
  misc_feature: DNAzyme
gtgcaacaggctagctacaacgacggggggg

SEQ ID NO: 15390 - DNA, 31 bp, Artificial Sequence
  Description of Artificial Sequence:  Nucleic Acid
  misc_feature: DNAzyme
ccgtgcaaggctagctacaacgaatcggggg

SEQ ID NO: 15391 - DNA, 31 bp, Artificial Sequence
  Description of Artificial Sequence:  Nucleic Acid
  misc_feature: DNAzyme
cccccgtgggctagctacaacgaaacatcgg

SEQ ID NO: 15392 - DNA, 31 bp, Artificial Sequence
  Description of Artificial Sequence:  Nucleic Acid
  misc_feature: DNAzyme
gccccccgggctagctacaacgagcaacatc

SEQ ID NO: 15393 - DNA, 31 bp, Artificial Sequence
  Description of Artificial Sequence:  Nucleic Acid
  misc_feature: DNAzyme
tgcgggggggctagctacaacgacccccgtg

SEQ ID NO: 15394 - DNA, 31 bp, Artificial Sequence
  Description of Artificial Sequence:  Nucleic Acid
  misc_feature: DNAzyme
aagacgtgggctagctacaacgagggggccc

SEQ ID NO: 15395 - DNA, 31 bp, Artificial Sequence
  Description of Artificial Sequence:  Nucleic Acid
  misc_feature: DNAzyme
ccaagacgggctagctacaacgagcgggggc

SEQ ID NO: 15396 - DNA, 31 bp, Artificial Sequence
  Description of Artificial Sequence:  Nucleic Acid
  misc_feature: DNAzyme
caccaagaggctagctacaacgagtgcgggg

SEQ ID NO: 15397 - DNA, 31 bp, Artificial Sequence
  Description of Artificial Sequence:  Nucleic Acid
  misc_feature: DNAzyme
tgggttcaggctagctacaacgacaagacgt

SEQ ID NO: 15398 - DNA, 31 bp, Artificial Sequence
  Description of Artificial Sequence:  Nucleic Acid
  misc_feature: DNAzyme
gcactgggggctagctacaacgatcaccaag

SEQ ID NO: 15399 - DNA, 31 bp, Artificial Sequence
  Description of Artificial Sequence:  Nucleic Acid
  misc_feature: DNAzyme
gaatggcaggctagctacaacgatgggttca

SEQ ID NO: 15400 - DNA, 31 bp, Artificial Sequence
  Description of Artificial Sequence:  Nucleic Acid
  misc_feature: DNAzyme
atgaatggggctagctacaacgaactgggtt

SEQ ID NO: 15401 - DNA, 31 bp, Artificial Sequence
  Description of Artificial Sequence:  Nucleic Acid
  misc_feature: DNAzyme
tggatgaaggctagctacaacgaggcactgg

SEQ ID NO: 15402 - DNA, 31 bp, Artificial Sequence
  Description of Artificial Sequence:  Nucleic Acid
  misc_feature: DNAzyme
cacatggaggctagctacaacgagaatggca

SEQ ID NO: 15403 - DNA, 31 bp, Artificial Sequence
  Description of Artificial Sequence:  Nucleic Acid
  misc_feature: DNAzyme
gctgcacaggctagctacaacgaggatgaat

SEQ ID NO: 15404 - DNA, 31 bp, Artificial Sequence
  Description of Artificial Sequence:  Nucleic Acid
  misc_feature: DNAzyme
cggctgcaggctagctacaacgaatggatga

SEQ ID NO: 15405 - DNA, 31 bp, Artificial Sequence
  Description of Artificial Sequence:  Nucleic Acid
  misc_feature: DNAzyme
ttcggctgggctagctacaacgaacatggat

SEQ ID NO: 15406 - DNA, 31 bp, Artificial Sequence
  Description of Artificial Sequence:  Nucleic Acid
  misc_feature: DNAzyme
tggttcggggctagctacaacgatgcacatg

SEQ ID NO: 15407 - DNA, 31 bp, Artificial Sequence
  Description of Artificial Sequence:  Nucleic Acid
  misc_feature: DNAzyme
gcaactggggctagctacaacgatcggctgc

SEQ ID NO: 15408 - DNA, 31 bp, Artificial Sequence
  Description of Artificial Sequence:  Nucleic Acid
  misc_feature: DNAzyme
caaggcaaggctagctacaacgatggttcgg

SEQ ID NO: 15409 - DNA, 31 bp, Artificial Sequence
  Description of Artificial Sequence:  Nucleic Acid
  misc_feature: DNAzyme
ccgcaaggggctagctacaacgaaactggtt

SEQ ID NO: 15410 - DNA, 31 bp, Artificial Sequence
  Description of Artificial Sequence:  Nucleic Acid
  misc_feature: DNAzyme
ggccgccgggctagctacaacgaaaggcaac

SEQ ID NO: 15411 - DNA, 31 bp, Artificial Sequence
  Description of Artificial Sequence:  Nucleic Acid
  misc_feature: DNAzyme
cgcggccgggctagctacaacgacgcaaggc

SEQ ID NO: 15412 - DNA, 31 bp, Artificial Sequence
  Description of Artificial Sequence:  Nucleic Acid
  misc_feature: DNAzyme
acacgcggggctagctacaacgacgccgcaa

SEQ ID NO: 15413 - DNA, 31 bp, Artificial Sequence
  Description of Artificial Sequence:  Nucleic Acid
  misc_feature: DNAzyme
acaacacgggctagctacaacgaggccgccg

SEQ ID NO: 15414 - DNA, 31 bp, Artificial Sequence
  Description of Artificial Sequence:  Nucleic Acid
  misc_feature: DNAzyme
caacaacaggctagctacaacgagcggccgc

SEQ ID NO: 15415 - DNA, 31 bp, Artificial Sequence
  Description of Artificial Sequence:  Nucleic Acid
  misc_feature: DNAzyme
ctcaacaaggctagctacaacgaacgcggcc

SEQ ID NO: 15416 - DNA, 31 bp, Artificial Sequence
  Description of Artificial Sequence:  Nucleic Acid
  misc_feature: DNAzyme
ctcctcaaggctagctacaacgaaacacgcg

SEQ ID NO: 15417 - DNA, 31 bp, Artificial Sequence
  Description of Artificial Sequence:  Nucleic Acid
  misc_feature: DNAzyme
acgtgctgggctagctacaacgatcctcaac

SEQ ID NO: 15418 - DNA, 31 bp, Artificial Sequence
  Description of Artificial Sequence:  Nucleic Acid
  misc_feature: DNAzyme
cggacgtgggctagctacaacgatgctcctc

SEQ ID NO: 15419 - DNA, 31 bp, Artificial Sequence
  Description of Artificial Sequence:  Nucleic Acid
  misc_feature: DNAzyme
gacggacgggctagctacaacgagctgctcc

SEQ ID NO: 15420 - DNA, 31 bp, Artificial Sequence
  Description of Artificial Sequence:  Nucleic Acid
  misc_feature: DNAzyme
gagacggaggctagctacaacgagtgctgct

SEQ ID NO: 15421 - DNA, 31 bp, Artificial Sequence
  Description of Artificial Sequence:  Nucleic Acid
  misc_feature: DNAzyme
gaacgagaggctagctacaacgaggacgtgc

SEQ ID NO: 15422 - DNA, 31 bp, Artificial Sequence
  Description of Artificial Sequence:  Nucleic Acid
  misc_feature: DNAzyme
ggggcgaaggctagctacaacgagagacgga

SEQ ID NO: 15423 - DNA, 31 bp, Artificial Sequence
  Description of Artificial Sequence:  Nucleic Acid
  misc_feature: DNAzyme
ctggggggggctagctacaacgagaacgaga

SEQ ID NO: 15424 - DNA, 31 bp, Artificial Sequence
  Description of Artificial Sequence:  Nucleic Acid
  misc_feature: DNAzyme
acgtataaggctagctacaacgatggggggc

SEQ ID NO: 15425 - DNA, 31 bp, Artificial Sequence
  Description of Artificial Sequence:  Nucleic Acid
  misc_feature: DNAzyme
cccacgtaggctagctacaacgaaactgggg

SEQ ID NO: 15426 - DNA, 31 bp, Artificial Sequence
  Description of Artificial Sequence:  Nucleic Acid
  misc_feature: DNAzyme
cccccacgggctagctacaacgaataactgg

SEQ ID NO: 15427 - DNA, 31 bp, Artificial Sequence
  Description of Artificial Sequence:  Nucleic Acid
  misc_feature: DNAzyme
cgcccccaggctagctacaacgagtataact

SEQ ID NO: 15428 - DNA, 31 bp, Artificial Sequence
  Description of Artificial Sequence:  Nucleic Acid
  misc_feature: DNAzyme
tttcggcgggctagctacaacgaccccacgt

SEQ ID NO: 15429 - DNA, 31 bp, Artificial Sequence
  Description of Artificial Sequence:  Nucleic Acid
  misc_feature: DNAzyme
cgtttcggggctagctacaacgagcccccac

SEQ ID NO: 15430 - DNA, 31 bp, Artificial Sequence
  Description of Artificial Sequence:  Nucleic Acid
  misc_feature: DNAzyme
accgaccgggctagctacaacgattcggcgc

SEQ ID NO: 15431 - DNA, 31 bp, Artificial Sequence
  Description of Artificial Sequence:  Nucleic Acid
  misc_feature: DNAzyme
acgaccgaggctagctacaacgacgtttcgg

SEQ ID NO: 15432 - DNA, 31 bp, Artificial Sequence
  Description of Artificial Sequence:  Nucleic Acid
  misc_feature: DNAzyme
ggggacgaggctagctacaacgacgaccgtt

SEQ ID NO: 15433 - DNA, 31 bp, Artificial Sequence
  Description of Artificial Sequence:  Nucleic Acid
  misc_feature: DNAzyme
ggtggggaggctagctacaacgagaccgacc

SEQ ID NO: 15434 - DNA, 31 bp, Artificial Sequence
  Description of Artificial Sequence:  Nucleic Acid
  misc_feature: DNAzyme
tgttgtggggctagctacaacgaggggacga

SEQ ID NO: 15435 - DNA, 31 bp, Artificial Sequence
  Description of Artificial Sequence:  Nucleic Acid
  misc_feature: DNAzyme
ccctgttgggctagctacaacgaggtgggga

SEQ ID NO: 15436 - DNA, 31 bp, Artificial Sequence
  Description of Artificial Sequence:  Nucleic Acid
  misc_feature: DNAzyme
aagccctgggctagctacaacgatgtggtgg

SEQ ID NO: 15437 - DNA, 31 bp, Artificial Sequence
  Description of Artificial Sequence:  Nucleic Acid
  misc_feature: DNAzyme
accccaagggctagctacaacgacctgttgt

SEQ ID NO: 15438 - DNA, 31 bp, Artificial Sequence
  Description of Artificial Sequence:  Nucleic Acid
  misc_feature: DNAzyme
ttgcttcaggctagctacaacgacccaagcc

SEQ ID NO: 15439 - DNA, 31 bp, Artificial Sequence
  Description of Artificial Sequence:  Nucleic Acid
  misc_feature: DNAzyme
gtgtattgggctagctacaacgattcacccc

SEQ ID NO: 15440 - DNA, 31 bp, Artificial Sequence
  Description of Artificial Sequence:  Nucleic Acid
  misc_feature: DNAzyme
ccagtgtaggctagctacaacgatgcttcac

SEQ ID NO: 15441 - DNA, 31 bp, Artificial Sequence
  Description of Artificial Sequence:  Nucleic Acid
  misc_feature: DNAzyme
gtccagtgggctagctacaacgaattgcttc

SEQ ID NO: 15442 - DNA, 31 bp, Artificial Sequence
  Description of Artificial Sequence:  Nucleic Acid
  misc_feature: DNAzyme
tggtccagggctagctacaacgagtattgct

SEQ ID NO: 15443 - DNA, 31 bp, Artificial Sequence
  Description of Artificial Sequence:  Nucleic Acid
  misc_feature: DNAzyme
gtatgtggggctagctacaacgaccagtgta

SEQ ID NO: 15444 - DNA, 31 bp, Artificial Sequence
  Description of Artificial Sequence:  Nucleic Acid
  misc_feature: DNAzyme
caggtatgggctagctacaacgaggtccagt

SEQ ID NO: 15445 - DNA, 31 bp, Artificial Sequence
  Description of Artificial Sequence:  Nucleic Acid
  misc_feature: DNAzyme
cgcaggtaggctagctacaacgagtggtcca

SEQ ID NO: 15446 - DNA, 31 bp, Artificial Sequence
  Description of Artificial Sequence:  Nucleic Acid
  misc_feature: DNAzyme
atcgcaggggctagctacaacgaatgtggtc

SEQ ID NO: 15447 - DNA, 31 bp, Artificial Sequence
  Description of Artificial Sequence:  Nucleic Acid
  misc_feature: DNAzyme
ccgcatcgggctagctacaacgaaggtatgt

SEQ ID NO: 15448 - DNA, 31 bp, Artificial Sequence
  Description of Artificial Sequence:  Nucleic Acid
  misc_feature: DNAzyme
tacccgcaggctagctacaacgacgcaggta

SEQ ID NO: 15449 - DNA, 31 bp, Artificial Sequence
  Description of Artificial Sequence:  Nucleic Acid
  misc_feature: DNAzyme
cgtacccgggctagctacaacgaatcgcagg

SEQ ID NO: 15450 - DNA, 31 bp, Artificial Sequence
  Description of Artificial Sequence:  Nucleic Acid
  misc_feature: DNAzyme
gtatcgtaggctagctacaacgaccgcatcg

SEQ ID NO: 15451 - DNA, 31 bp, Artificial Sequence
  Description of Artificial Sequence:  Nucleic Acid
  misc_feature: DNAzyme
tggtatcgggctagctacaacgaacccgcat

SEQ ID NO: 15452 - DNA, 31 bp, Artificial Sequence
  Description of Artificial Sequence:  Nucleic Acid
  misc_feature: DNAzyme
gtgtggtaggctagctacaacgacgtacccg

SEQ ID NO: 15453 - DNA, 31 bp, Artificial Sequence
  Description of Artificial Sequence:  Nucleic Acid
  misc_feature: DNAzyme
ccgtgtggggctagctacaacgaatcgtacc

SEQ ID NO: 15454 - DNA, 31 bp, Artificial Sequence
  Description of Artificial Sequence:  Nucleic Acid
  misc_feature: DNAzyme
cggccgtgggctagctacaacgaggtatcgt

SEQ ID NO: 15455 - DNA, 31 bp, Artificial Sequence
  Description of Artificial Sequence:  Nucleic Acid
  misc_feature: DNAzyme
cgcggccgggctagctacaacgagtggtatc

SEQ ID NO: 15456 - DNA, 31 bp, Artificial Sequence
  Description of Artificial Sequence:  Nucleic Acid
  misc_feature: DNAzyme
caccgcggggctagctacaacgacgtgtggt

SEQ ID NO: 15457 - DNA, 31 bp, Artificial Sequence
  Description of Artificial Sequence:  Nucleic Acid
  misc_feature: DNAzyme
acgcaccgggctagctacaacgaggccgtgt

SEQ ID NO: 15458 - DNA, 31 bp, Artificial Sequence
  Description of Artificial Sequence:  Nucleic Acid
  misc_feature: DNAzyme
actacgcaggctagctacaacgacgcggccg

SEQ ID NO: 15459 - DNA, 31 bp, Artificial Sequence
  Description of Artificial Sequence:  Nucleic Acid
  misc_feature: DNAzyme
gcactacgggctagctacaacgaaccgcggc

SEQ ID NO: 15460 - DNA, 31 bp, Artificial Sequence
  Description of Artificial Sequence:  Nucleic Acid
  misc_feature: DNAzyme
tggcactaggctagctacaacgagcaccgcg

SEQ ID NO: 15461 - DNA, 31 bp, Artificial Sequence
  Description of Artificial Sequence:  Nucleic Acid
  misc_feature: DNAzyme
tgctggcaggctagctacaacgatacgcacc

SEQ ID NO: 15462 - DNA, 31 bp, Artificial Sequence
  Description of Artificial Sequence:  Nucleic Acid
  misc_feature: DNAzyme
attgctggggctagctacaacgaactacgca

SEQ ID NO: 15463 - DNA, 31 bp, Artificial Sequence
  Description of Artificial Sequence:  Nucleic Acid
  misc_feature: DNAzyme
ccctattgggctagctacaacgatggcacta

SEQ ID NO: 15464 - DNA, 31 bp, Artificial Sequence
  Description of Artificial Sequence:  Nucleic Acid
  misc_feature: DNAzyme
aggccctaggctagctacaacgatgctggca

SEQ ID NO: 15465 - DNA, 31 bp, Artificial Sequence
  Description of Artificial Sequence:  Nucleic Acid
  misc_feature: DNAzyme
accagaggggctagctacaacgacctattgc

SEQ ID NO: 15466 - DNA, 31 bp, Artificial Sequence
  Description of Artificial Sequence:  Nucleic Acid
  misc_feature: DNAzyme
aactcggaggctagctacaacgacagaggcc

SEQ ID NO: 15467 - DNA, 31 bp, Artificial Sequence
  Description of Artificial Sequence:  Nucleic Acid
  misc_feature: DNAzyme
ggccacaaggctagctacaacgatcggacca

SEQ ID NO: 15468 - DNA, 31 bp, Artificial Sequence
  Description of Artificial Sequence:  Nucleic Acid
  misc_feature: DNAzyme
gagggccaggctagctacaacgaaactcgga

SEQ ID NO: 15469 - DNA, 31 bp, Artificial Sequence
  Description of Artificial Sequence:  Nucleic Acid
  misc_feature: DNAzyme
accgagggggctagctacaacgacacaactc

SEQ ID NO: 15470 - DNA, 31 bp, Artificial Sequence
  Description of Artificial Sequence:  Nucleic Acid
  misc_feature: DNAzyme
cacctacaggctagctacaacgacgagggcc

SEQ ID NO: 15471 - DNA, 31 bp, Artificial Sequence
  Description of Artificial Sequence:  Nucleic Acid
  misc_feature: DNAzyme
atcacctaggctagctacaacgaaccgaggg

SEQ ID NO: 15472 - DNA, 31 bp, Artificial Sequence
  Description of Artificial Sequence:  Nucleic Acid
  misc_feature: DNAzyme
tcctatcaggctagctacaacgactacaccg

SEQ ID NO: 15473 - DNA, 31 bp, Artificial Sequence
  Description of Artificial Sequence:  Nucleic Acid
  misc_feature: DNAzyme
gggtcctaggctagctacaacgacacctaca

SEQ ID NO: 15474 - DNA, 31 bp, Artificial Sequence
  Description of Artificial Sequence:  Nucleic Acid
  misc_feature: DNAzyme
gggtggggggctagctacaacgacctatcac

SEQ ID NO: 15475 - DNA, 31 bp, Artificial Sequence
  Description of Artificial Sequence:  Nucleic Acid
  misc_feature: DNAzyme
ctcaggggggctagctacaacgaggggtcct

SEQ ID NO: 15476 - DNA, 31 bp, Artificial Sequence
  Description of Artificial Sequence:  Nucleic Acid
  misc_feature: DNAzyme
caagttcgggctagctacaacgatcaggggt

SEQ ID NO: 15477 - DNA, 31 bp, Artificial Sequence
  Description of Artificial Sequence:  Nucleic Acid
  misc_feature: DNAzyme
ttgacaagggctagctacaacgatcgctcag

SEQ ID NO: 15478 - DNA, 31 bp, Artificial Sequence
  Description of Artificial Sequence:  Nucleic Acid
  misc_feature: DNAzyme
tccattgaggctagctacaacgaaagttcgc

SEQ ID NO: 15479 - DNA, 31 bp, Artificial Sequence
  Description of Artificial Sequence:  Nucleic Acid
  misc_feature: DNAzyme
ccgctccaggctagctacaacgatgacaagt

SEQ ID NO: 15480 - DNA, 31 bp, Artificial Sequence
  Description of Artificial Sequence:  Nucleic Acid
  misc_feature: DNAzyme
agctgccgggctagctacaacgatccattga

SEQ ID NO: 15481 - DNA, 31 bp, Artificial Sequence
  Description of Artificial Sequence:  Nucleic Acid
  misc_feature: DNAzyme
gccagctgggctagctacaacgacgctccat

SEQ ID NO: 15482 - DNA, 31 bp, Artificial Sequence
  Description of Artificial Sequence:  Nucleic Acid
  misc_feature: DNAzyme
ttggccagggctagctacaacgatgccgctc

SEQ ID NO: 15483 - DNA, 31 bp, Artificial Sequence
  Description of Artificial Sequence:  Nucleic Acid
  misc_feature: DNAzyme
gcgcttggggctagctacaacgacagctgcc

SEQ ID NO: 15484 - DNA, 31 bp, Artificial Sequence
  Description of Artificial Sequence:  Nucleic Acid
  misc_feature: DNAzyme
ccacagcgggctagctacaacgattggccag

SEQ ID NO: 15485 - DNA, 31 bp, Artificial Sequence
  Description of Artificial Sequence:  Nucleic Acid
  misc_feature: DNAzyme
gcccacagggctagctacaacgagcttggcc

SEQ ID NO: 15486 - DNA, 31 bp, Artificial Sequence
  Description of Artificial Sequence:  Nucleic Acid
  misc_feature: DNAzyme
gatgcccaggctagctacaacgaagcgcttg

SEQ ID NO: 15487 - DNA, 31 bp, Artificial Sequence
  Description of Artificial Sequence:  Nucleic Acid
  misc_feature: DNAzyme
tccggatgggctagctacaacgaccacagcg

SEQ ID NO: 15488 - DNA, 31 bp, Artificial Sequence
  Description of Artificial Sequence:  Nucleic Acid
  misc_feature: DNAzyme
cgtccggaggctagctacaacgagcccacag

SEQ ID NO: 15489 - DNA, 31 bp, Artificial Sequence
  Description of Artificial Sequence:  Nucleic Acid
  misc_feature: DNAzyme
tcaactcgggctagctacaacgaccggatgc

SEQ ID NO: 15490 - DNA, 31 bp, Artificial Sequence
  Description of Artificial Sequence:  Nucleic Acid
  misc_feature: DNAzyme
aggttcaaggctagctacaacgatcgtccgg

SEQ ID NO: 15491 - DNA, 31 bp, Artificial Sequence
  Description of Artificial Sequence:  Nucleic Acid
  misc_feature: DNAzyme
cacacaggggctagctacaacgatcaactcg

SEQ ID NO: 15492 - DNA, 31 bp, Artificial Sequence
  Description of Artificial Sequence:  Nucleic Acid
  misc_feature: DNAzyme
tatgcacaggctagctacaacgaaggttcaa

SEQ ID NO: 15493 - DNA, 31 bp, Artificial Sequence
  Description of Artificial Sequence:  Nucleic Acid
  misc_feature: DNAzyme
tctatgcaggctagctacaacgaacaggttc

SEQ ID NO: 15494 - DNA, 31 bp, Artificial Sequence
  Description of Artificial Sequence:  Nucleic Acid
  misc_feature: DNAzyme
gttctatgggctagctacaacgaacacaggt

SEQ ID NO: 15495 - DNA, 31 bp, Artificial Sequence
  Description of Artificial Sequence:  Nucleic Acid
  misc_feature: DNAzyme
ctgttctaggctagctacaacgagcacacag

SEQ ID NO: 15496 - DNA, 31 bp, Artificial Sequence
  Description of Artificial Sequence:  Nucleic Acid
  misc_feature: DNAzyme
ctgcactgggctagctacaacgatctatgca

SEQ ID NO: 15497 - DNA, 31 bp, Artificial Sequence
  Description of Artificial Sequence:  Nucleic Acid
  misc_feature: DNAzyme
ttgctgcaggctagctacaacgatgttctat

SEQ ID NO: 15498 - DNA, 31 bp, Artificial Sequence
  Description of Artificial Sequence:  Nucleic Acid
  misc_feature: DNAzyme
cattgctgggctagctacaacgaactgttct

SEQ ID NO: 15499 - DNA, 31 bp, Artificial Sequence
  Description of Artificial Sequence:  Nucleic Acid
  misc_feature: DNAzyme
gttcattgggctagctacaacgatgcactgt

SEQ ID NO: 15500 - DNA, 31 bp, Artificial Sequence
  Description of Artificial Sequence:  Nucleic Acid
  misc_feature: DNAzyme
cgggttcaggctagctacaacgatgctgcac

SEQ ID NO: 15501 - DNA, 31 bp, Artificial Sequence
  Description of Artificial Sequence:  Nucleic Acid
  misc_feature: DNAzyme
aaaccgggggctagctacaacgatcattgct

SEQ ID NO: 15502 - DNA, 31 bp, Artificial Sequence
  Description of Artificial Sequence:  Nucleic Acid
  misc_feature: DNAzyme
cctccaaaggctagctacaacgacgggttca

SEQ ID NO: 15503 - DNA, 31 bp, Artificial Sequence
  Description of Artificial Sequence:  Nucleic Acid
  misc_feature: DNAzyme
tgcaatgaggctagctacaacgatccctcca

SEQ ID NO: 15504 - DNA, 31 bp, Artificial Sequence
  Description of Artificial Sequence:  Nucleic Acid
  misc_feature: DNAzyme
aactgcaaggctagctacaacgagactccct

SEQ ID NO: 15505 - DNA, 31 bp, Artificial Sequence
  Description of Artificial Sequence:  Nucleic Acid
  misc_feature: DNAzyme
ctgaactgggctagctacaacgaaatgactc

SEQ ID NO: 15506 - DNA, 31 bp, Artificial Sequence
  Description of Artificial Sequence:  Nucleic Acid
  misc_feature: DNAzyme
gccctgaaggctagctacaacgatgcaatga

SEQ ID NO: 15507 - DNA, 31 bp, Artificial Sequence
  Description of Artificial Sequence:  Nucleic Acid
  misc_feature: DNAzyme
caggactgggctagctacaacgacctgaact

SEQ ID NO: 15508 - DNA, 31 bp, Artificial Sequence
  Description of Artificial Sequence:  Nucleic Acid
  misc_feature: DNAzyme
taacaggaggctagctacaacgatgccctga

SEQ ID NO: 15509 - DNA, 31 bp, Artificial Sequence
  Description of Artificial Sequence:  Nucleic Acid
  misc_feature: DNAzyme
cacattaaggctagctacaacgaaggactgc

SEQ ID NO: 15510 - DNA, 31 bp, Artificial Sequence
  Description of Artificial Sequence:  Nucleic Acid
  misc_feature: DNAzyme
ctggcacaggctagctacaacgataacagga

SEQ ID NO: 15511 - DNA, 31 bp, Artificial Sequence
  Description of Artificial Sequence:  Nucleic Acid
  misc_feature: DNAzyme
agctggcaggctagctacaacgaattaacag

SEQ ID NO: 15512 - DNA, 31 bp, Artificial Sequence
  Description of Artificial Sequence:  Nucleic Acid
  misc_feature: DNAzyme
gcagctggggctagctacaacgaacattaac

SEQ ID NO: 15513 - DNA, 31 bp, Artificial Sequence
  Description of Artificial Sequence:  Nucleic Acid
  misc_feature: DNAzyme
aacggcagggctagctacaacgatggcacat

SEQ ID NO: 15514 - DNA, 31 bp, Artificial Sequence
  Description of Artificial Sequence:  Nucleic Acid
  misc_feature: DNAzyme
accaacggggctagctacaacgaagctggca

SEQ ID NO: 15515 - DNA, 31 bp, Artificial Sequence
  Description of Artificial Sequence:  Nucleic Acid
  misc_feature: DNAzyme
aacaccaaggctagctacaacgaggcagctg

SEQ ID NO: 15516 - DNA, 31 bp, Artificial Sequence
  Description of Artificial Sequence:  Nucleic Acid
  misc_feature: DNAzyme
tattaacaggctagctacaacgacaacggca

SEQ ID NO: 15517 - DNA, 31 bp, Artificial Sequence
  Description of Artificial Sequence:  Nucleic Acid
  misc_feature: DNAzyme
cttattaaggctagctacaacgaaccaacgg

SEQ ID NO: 15518 - DNA, 31 bp, Artificial Sequence
  Description of Artificial Sequence:  Nucleic Acid
  misc_feature: DNAzyme
ccagcttaggctagctacaacgataacacca

SEQ ID NO: 15519 - DNA, 31 bp, Artificial Sequence
  Description of Artificial Sequence:  Nucleic Acid
  misc_feature: DNAzyme
atatccagggctagctacaacgattattaac

SEQ ID NO: 15520 - DNA, 31 bp, Artificial Sequence
  Description of Artificial Sequence:  Nucleic Acid
  misc_feature: DNAzyme
tcagaataggctagctacaacgaccagctta

SEQ ID NO: 15521 - DNA, 31 bp, Artificial Sequence
  Description of Artificial Sequence:  Nucleic Acid
  misc_feature: DNAzyme
tctcagaaggctagctacaacgaatccagct

SEQ ID NO: 15522 - DNA, 31 bp, Artificial Sequence
  Description of Artificial Sequence:  Nucleic Acid
  misc_feature: DNAzyme
ctggagcaggctagctacaacgactcagaat

SEQ ID NO: 15523 - DNA, 31 bp, Artificial Sequence
  Description of Artificial Sequence:  Nucleic Acid
  misc_feature: DNAzyme
atctggagggctagctacaacgaatctcaga

SEQ ID NO: 15524 - DNA, 31 bp, Artificial Sequence
  Description of Artificial Sequence:  Nucleic Acid
  misc_feature: DNAzyme
tctttacaggctagctacaacgactggagca

SEQ ID NO: 15525 - DNA, 31 bp, Artificial Sequence
  Description of Artificial Sequence:  Nucleic Acid
  misc_feature: DNAzyme
cctctttaggctagctacaacgaatctggag

SEQ ID NO: 15526 - DNA, 31 bp, Artificial Sequence
  Description of Artificial Sequence:  Nucleic Acid
  misc_feature: DNAzyme
gggtggcaggctagctacaacgaccctcttt

SEQ ID NO: 15527 - DNA, 31 bp, Artificial Sequence
  Description of Artificial Sequence:  Nucleic Acid
  misc_feature: DNAzyme
tagggtggggctagctacaacgaatccctct

SEQ ID NO: 15528 - DNA, 31 bp, Artificial Sequence
  Description of Artificial Sequence:  Nucleic Acid
  misc_feature: DNAzyme
tagtagggggctagctacaacgaggcatccc

SEQ ID NO: 15529 - DNA, 31 bp, Artificial Sequence
  Description of Artificial Sequence:  Nucleic Acid
  misc_feature: DNAzyme
accactagggctagctacaacgaagggtggc

SEQ ID NO: 15530 - DNA, 31 bp, Artificial Sequence
  Description of Artificial Sequence:  Nucleic Acid
  misc_feature: DNAzyme
ccacaccaggctagctacaacgatagtaggg

SEQ ID NO: 15531 - DNA, 31 bp, Artificial Sequence
  Description of Artificial Sequence:  Nucleic Acid
  misc_feature: DNAzyme
gggccacaggctagctacaacgacactagta

SEQ ID NO: 15532 - DNA, 31 bp, Artificial Sequence
  Description of Artificial Sequence:  Nucleic Acid
  misc_feature: DNAzyme
cagggccaggctagctacaacgaaccactag

SEQ ID NO: 15533 - DNA, 31 bp, Artificial Sequence
  Description of Artificial Sequence:  Nucleic Acid
  misc_feature: DNAzyme
gcgcagggggctagctacaacgacacaccac

SEQ ID NO: 15534 - DNA, 31 bp, Artificial Sequence
  Description of Artificial Sequence:  Nucleic Acid
  misc_feature: DNAzyme
ggggggcgggctagctacaacgaagggccac

SEQ ID NO: 15535 - DNA, 31 bp, Artificial Sequence
  Description of Artificial Sequence:  Nucleic Acid
  misc_feature: DNAzyme
agggggggggctagctacaacgagcagggcc

SEQ ID NO: 15536 - DNA, 31 bp, Artificial Sequence
  Description of Artificial Sequence:  Nucleic Acid
  misc_feature: DNAzyme
ctacacgaggctagctacaacgaaggggggg

SEQ ID NO: 15537 - DNA, 31 bp, Artificial Sequence
  Description of Artificial Sequence:  Nucleic Acid
  misc_feature: DNAzyme
cacctacaggctagctacaacgagacagggg

SEQ ID NO: 15538 - DNA, 31 bp, Artificial Sequence
  Description of Artificial Sequence:  Nucleic Acid
  misc_feature: DNAzyme
gacacctaggctagctacaacgaacgacagg

SEQ ID NO: 15539 - DNA, 31 bp, Artificial Sequence
  Description of Artificial Sequence:  Nucleic Acid
  misc_feature: DNAzyme
cggggacaggctagctacaacgactacacga

SEQ ID NO: 15540 - DNA, 31 bp, Artificial Sequence
  Description of Artificial Sequence:  Nucleic Acid
  misc_feature: DNAzyme
gacggggaggctagctacaacgaacctacac

SEQ ID NO: 15541 - DNA, 31 bp, Artificial Sequence
  Description of Artificial Sequence:  Nucleic Acid
  misc_feature: DNAzyme
ggcgttgaggctagctacaacgaggggacac

SEQ ID NO: 15542 - DNA, 31 bp, Artificial Sequence
  Description of Artificial Sequence:  Nucleic Acid
  misc_feature: DNAzyme
tgccggcgggctagctacaacgatgacgggg

SEQ ID NO: 15543 - DNA, 31 bp, Artificial Sequence
  Description of Artificial Sequence:  Nucleic Acid
  misc_feature: DNAzyme
tttgccggggctagctacaacgagttgacgg

SEQ ID NO: 15544 - DNA, 31 bp, Artificial Sequence
  Description of Artificial Sequence:  Nucleic Acid
  misc_feature: DNAzyme
actctttgggctagctacaacgacggcgttg

SEQ ID NO: 15545 - DNA, 31 bp, Artificial Sequence
  Description of Artificial Sequence:  Nucleic Acid
  misc_feature: DNAzyme
tgatgctaggctagctacaacgatctttgcc

SEQ ID NO: 15546 - DNA, 31 bp, Artificial Sequence
  Description of Artificial Sequence:  Nucleic Acid
  misc_feature: DNAzyme
ttgtgatgggctagctacaacgatactcttt

SEQ ID NO: 15547 - DNA, 31 bp, Artificial Sequence
  Description of Artificial Sequence:  Nucleic Acid
  misc_feature: DNAzyme
gattgtgaggctagctacaacgagctactct

SEQ ID NO: 15548 - DNA, 31 bp, Artificial Sequence
  Description of Artificial Sequence:  Nucleic Acid
  misc_feature: DNAzyme
gttgattgggctagctacaacgagatgctac

SEQ ID NO: 15549 - DNA, 31 bp, Artificial Sequence
  Description of Artificial Sequence:  Nucleic Acid
  misc_feature: DNAzyme
ggtgttgaggctagctacaacgatgtgatgc

SEQ ID NO: 15550 - DNA, 31 bp, Artificial Sequence
  Description of Artificial Sequence:  Nucleic Acid
  misc_feature: DNAzyme
ctaaggtgggctagctacaacgatgattgtg

SEQ ID NO: 15551 - DNA, 31 bp, Artificial Sequence
  Description of Artificial Sequence:  Nucleic Acid
  misc_feature: DNAzyme
ggctaaggggctagctacaacgagttgattg

SEQ ID NO: 15552 - DNA, 31 bp, Artificial Sequence
  Description of Artificial Sequence:  Nucleic Acid
  misc_feature: DNAzyme
gaactgggggctagctacaacgataaggtgt

SEQ ID NO: 15553 - DNA, 31 bp, Artificial Sequence
  Description of Artificial Sequence:  Nucleic Acid
  misc_feature: DNAzyme
gtggggaaggctagctacaacgatgggctaa

SEQ ID NO: 15554 - DNA, 31 bp, Artificial Sequence
  Description of Artificial Sequence:  Nucleic Acid
  misc_feature: DNAzyme
ttccatggggctagctacaacgaggggaact

SEQ ID NO: 15555 - DNA, 31 bp, Artificial Sequence
  Description of Artificial Sequence:  Nucleic Acid
  misc_feature: DNAzyme
ttattccaggctagctacaacgaggtgggga

SEQ ID NO: 15556 - DNA, 31 bp, Artificial Sequence
  Description of Artificial Sequence:  Nucleic Acid
  misc_feature: DNAzyme
gcctattaggctagctacaacgatccatggt

SEQ ID NO: 15557 - DNA, 31 bp, Artificial Sequence
  Description of Artificial Sequence:  Nucleic Acid
  misc_feature: DNAzyme
cttgcctaggctagctacaacgatattccat

SEQ ID NO: 15558 - DNA, 31 bp, Artificial Sequence
  Description of Artificial Sequence:  Nucleic Acid
  misc_feature: DNAzyme
gggccttgggctagctacaacgactattatt

SEQ ID NO: 15559 - DNA, 31 bp, Artificial Sequence
  Description of Artificial Sequence:  Nucleic Acid
  misc_feature: DNAzyme
ctggcgggggctagctacaacgacttgccta

SEQ ID NO: 15560 - DNA, 31 bp, Artificial Sequence
  Description of Artificial Sequence:  Nucleic Acid
  misc_feature: DNAzyme
agtcctggggctagctacaacgagggccttg

SEQ ID NO: 15561 - DNA, 31 bp, Artificial Sequence
  Description of Artificial Sequence:  Nucleic Acid
  misc_feature: DNAzyme
ctggggagggctagctacaacgacctggcgg

SEQ ID NO: 15562 - DNA, 31 bp, Artificial Sequence
  Description of Artificial Sequence:  Nucleic Acid
  misc_feature: DNAzyme
ggggcccaggctagctacaacgatggggagt

SEQ ID NO: 15563 - DNA, 31 bp, Artificial Sequence
  Description of Artificial Sequence:  Nucleic Acid
  misc_feature: DNAzyme
ggcgggggggctagctacaacgaccactggg

SEQ ID NO: 15564 - DNA, 31 bp, Artificial Sequence
  Description of Artificial Sequence:  Nucleic Acid
  misc_feature: DNAzyme
catggtggggctagctacaacgagggggccc

SEQ ID NO: 15565 - DNA, 31 bp, Artificial Sequence
  Description of Artificial Sequence:  Nucleic Acid
  misc_feature: DNAzyme
ggacatggggctagctacaacgaggcggggg

SEQ ID NO: 15566 - DNA, 31 bp, Artificial Sequence
  Description of Artificial Sequence:  Nucleic Acid
  misc_feature: DNAzyme
cgtggacaggctagctacaacgaggtggcgg

SEQ ID NO: 15567 - DNA, 31 bp, Artificial Sequence
  Description of Artificial Sequence:  Nucleic Acid
  misc_feature: DNAzyme
gtcgtggaggctagctacaacgaatggtggc

SEQ ID NO: 15568 - DNA, 31 bp, Artificial Sequence
  Description of Artificial Sequence:  Nucleic Acid
  misc_feature: DNAzyme
agccgtcgggctagctacaacgaggacatgg

SEQ ID NO: 15569 - DNA, 31 bp, Artificial Sequence
  Description of Artificial Sequence:  Nucleic Acid
  misc_feature: DNAzyme
acaagccgggctagctacaacgacgtggaca

SEQ ID NO: 15570 - DNA, 31 bp, Artificial Sequence
  Description of Artificial Sequence:  Nucleic Acid
  misc_feature: DNAzyme
cccacaagggctagctacaacgacgtcgtgg

SEQ ID NO: 15571 - DNA, 31 bp, Artificial Sequence
  Description of Artificial Sequence:  Nucleic Acid
  misc_feature: DNAzyme
ggatcccaggctagctacaacgaaagccgtc

SEQ ID NO: 15572 - DNA, 31 bp, Artificial Sequence
  Description of Artificial Sequence:  Nucleic Acid
  misc_feature: DNAzyme
gctccggaggctagctacaacgacccacaag

SEQ ID NO: 15573 - DNA, 31 bp, Artificial Sequence
  Description of Artificial Sequence:  Nucleic Acid
  misc_feature: DNAzyme
cgcagttgggctagctacaacgatccggatc

SEQ ID NO: 15574 - DNA, 31 bp, Artificial Sequence
  Description of Artificial Sequence:  Nucleic Acid
  misc_feature: DNAzyme
tatcgcagggctagctacaacgatgctccgg

SEQ ID NO: 15575 - DNA, 31 bp, Artificial Sequence
  Description of Artificial Sequence:  Nucleic Acid
  misc_feature: DNAzyme
tggtatcgggctagctacaacgaagttgctc

SEQ ID NO: 15576 - DNA, 31 bp, Artificial Sequence
  Description of Artificial Sequence:  Nucleic Acid
  misc_feature: DNAzyme
tagtggtaggctagctacaacgacgcagttg

SEQ ID NO: 15577 - DNA, 31 bp, Artificial Sequence
  Description of Artificial Sequence:  Nucleic Acid
  misc_feature: DNAzyme
cctagtggggctagctacaacgaatcgcagt

SEQ ID NO: 15578 - DNA, 31 bp, Artificial Sequence
  Description of Artificial Sequence:  Nucleic Acid
  misc_feature: DNAzyme
agccctagggctagctacaacgaggtatcgc

SEQ ID NO: 15579 - DNA, 31 bp, Artificial Sequence
  Description of Artificial Sequence:  Nucleic Acid
  misc_feature: DNAzyme
tacaacagggctagctacaacgacctagtgg

SEQ ID NO: 15580 - DNA, 31 bp, Artificial Sequence
  Description of Artificial Sequence:  Nucleic Acid
  misc_feature: DNAzyme
acctacaaggctagctacaacgaagccctag

SEQ ID NO: 15581 - DNA, 31 bp, Artificial Sequence
  Description of Artificial Sequence:  Nucleic Acid
  misc_feature: DNAzyme
gtcacctaggctagctacaacgaaacagccc

SEQ ID NO: 15582 - DNA, 31 bp, Artificial Sequence
  Description of Artificial Sequence:  Nucleic Acid
  misc_feature: DNAzyme
attggtcaggctagctacaacgactacaaca

SEQ ID NO: 15583 - DNA, 31 bp, Artificial Sequence
  Description of Artificial Sequence:  Nucleic Acid
  misc_feature: DNAzyme
tgaattggggctagctacaacgacacctaca

SEQ ID NO: 15584 - DNA, 31 bp, Artificial Sequence
  Description of Artificial Sequence:  Nucleic Acid
  misc_feature: DNAzyme
atgatgaaggctagctacaacgatggtcacc

SEQ ID NO: 15585 - DNA, 31 bp, Artificial Sequence
  Description of Artificial Sequence:  Nucleic Acid
  misc_feature: DNAzyme
tatgatgaggctagctacaacgagaattggt

SEQ ID NO: 15586 - DNA, 31 bp, Artificial Sequence
  Description of Artificial Sequence:  Nucleic Acid
  misc_feature: DNAzyme
ggatatgaggctagctacaacgagatgaatt

SEQ ID NO: 15587 - DNA, 31 bp, Artificial Sequence
  Description of Artificial Sequence:  Nucleic Acid
  misc_feature: DNAzyme
ttgggataggctagctacaacgagatgatga

SEQ ID NO: 15588 - DNA, 31 bp, Artificial Sequence
  Description of Artificial Sequence:  Nucleic Acid
  misc_feature: DNAzyme
gcttgggaggctagctacaacgaatgatgat

SEQ ID NO: 15589 - DNA, 31 bp, Artificial Sequence
  Description of Artificial Sequence:  Nucleic Acid
  misc_feature: DNAzyme
tcgcatggggctagctacaacgattgggata

SEQ ID NO: 15590 - DNA, 31 bp, Artificial Sequence
  Description of Artificial Sequence:  Nucleic Acid
  misc_feature: DNAzyme
ccatcgcaggctagctacaacgaggcttggg

SEQ ID NO: 15591 - DNA, 31 bp, Artificial Sequence
  Description of Artificial Sequence:  Nucleic Acid
  misc_feature: DNAzyme
ggccatcgggctagctacaacgaatggcttg

SEQ ID NO: 15592 - DNA, 31 bp, Artificial Sequence
  Description of Artificial Sequence:  Nucleic Acid
  misc_feature: DNAzyme
tcaggccaggctagctacaacgacgcatggc

SEQ ID NO: 15593 - DNA, 31 bp, Artificial Sequence
  Description of Artificial Sequence:  Nucleic Acid
  misc_feature: DNAzyme
gtatcaggggctagctacaacgacatcgcat

SEQ ID NO: 15594 - DNA, 31 bp, Artificial Sequence
  Description of Artificial Sequence:  Nucleic Acid
  misc_feature: DNAzyme
gccacgtaggctagctacaacgacaggccat

SEQ ID NO: 15595 - DNA, 31 bp, Artificial Sequence
  Description of Artificial Sequence:  Nucleic Acid
  misc_feature: DNAzyme
cggccacgggctagctacaacgaatcaggcc

SEQ ID NO: 15596 - DNA, 31 bp, Artificial Sequence
  Description of Artificial Sequence:  Nucleic Acid
  misc_feature: DNAzyme
cccggccaggctagctacaacgagtatcagg

SEQ ID NO: 15597 - DNA, 31 bp, Artificial Sequence
  Description of Artificial Sequence:  Nucleic Acid
  misc_feature: DNAzyme
tatcccggggctagctacaacgacacgtatc

SEQ ID NO: 15598 - DNA, 31 bp, Artificial Sequence
  Description of Artificial Sequence:  Nucleic Acid
  misc_feature: DNAzyme
tcgatctaggctagctacaacgacccggcca

SEQ ID NO: 15599 - DNA, 31 bp, Artificial Sequence
  Description of Artificial Sequence:  Nucleic Acid
  misc_feature: DNAzyme
ttgctcgaggctagctacaacgactatcccg

SEQ ID NO: 15600 - DNA, 31 bp, Artificial Sequence
  Description of Artificial Sequence:  Nucleic Acid
  misc_feature: DNAzyme
tgtaattgggctagctacaacgatcgatcta

SEQ ID NO: 15601 - DNA, 31 bp, Artificial Sequence
  Description of Artificial Sequence:  Nucleic Acid
  misc_feature: DNAzyme
gactgtaaggctagctacaacgatgctcgat

SEQ ID NO: 15602 - DNA, 31 bp, Artificial Sequence
  Description of Artificial Sequence:  Nucleic Acid
  misc_feature: DNAzyme
caggactgggctagctacaacgaaattgctc

SEQ ID NO: 15603 - DNA, 31 bp, Artificial Sequence
  Description of Artificial Sequence:  Nucleic Acid
  misc_feature: DNAzyme
gtacaggaggctagctacaacgatgtaattg

SEQ ID NO: 15604 - DNA, 31 bp, Artificial Sequence
  Description of Artificial Sequence:  Nucleic Acid
  misc_feature: DNAzyme
agacagtaggctagctacaacgaaggactgt

SEQ ID NO: 15605 - DNA, 31 bp, Artificial Sequence
  Description of Artificial Sequence:  Nucleic Acid
  misc_feature: DNAzyme
tgagacagggctagctacaacgaacaggact

SEQ ID NO: 15606 - DNA, 31 bp, Artificial Sequence
  Description of Artificial Sequence:  Nucleic Acid
  misc_feature: DNAzyme
gtatgagaggctagctacaacgaagtacagg

SEQ ID NO: 15607 - DNA, 31 bp, Artificial Sequence
  Description of Artificial Sequence:  Nucleic Acid
  misc_feature: DNAzyme
cgccggtaggctagctacaacgagagacagt

SEQ ID NO: 15608 - DNA, 31 bp, Artificial Sequence
  Description of Artificial Sequence:  Nucleic Acid
  misc_feature: DNAzyme
ctcgccggggctagctacaacgaatgagaca

SEQ ID NO: 15609 - DNA, 31 bp, Artificial Sequence
  Description of Artificial Sequence:  Nucleic Acid
  misc_feature: DNAzyme
tcgcctcgggctagctacaacgacggtatga

SEQ ID NO: 15610 - DNA, 31 bp, Artificial Sequence
  Description of Artificial Sequence:  Nucleic Acid
  misc_feature: DNAzyme
ccttctcgggctagctacaacgactcgccgg

SEQ ID NO: 15611 - DNA, 31 bp, Artificial Sequence
  Description of Artificial Sequence:  Nucleic Acid
  misc_feature: DNAzyme
gctgttcaggctagctacaacgacttctcgc

SEQ ID NO: 15612 - DNA, 31 bp, Artificial Sequence
  Description of Artificial Sequence:  Nucleic Acid
  misc_feature: DNAzyme
ctcagctgggctagctacaacgatcaccttc

SEQ ID NO: 15613 - DNA, 31 bp, Artificial Sequence
  Description of Artificial Sequence:  Nucleic Acid
  misc_feature: DNAzyme
tctctcagggctagctacaacgatgttcacc

SEQ ID NO: 15614 - DNA, 31 bp, Artificial Sequence
  Description of Artificial Sequence:  Nucleic Acid
  misc_feature: DNAzyme
cttcctcgggctagctacaacgactctcagc

SEQ ID NO: 15615 - DNA, 31 bp, Artificial Sequence
  Description of Artificial Sequence:  Nucleic Acid
  misc_feature: DNAzyme
cggatctgggctagctacaacgacttcctcg

SEQ ID NO: 15616 - DNA, 31 bp, Artificial Sequence
  Description of Artificial Sequence:  Nucleic Acid
  misc_feature: DNAzyme
tctgcggaggctagctacaacgactgtcttc

SEQ ID NO: 15617 - DNA, 31 bp, Artificial Sequence
  Description of Artificial Sequence:  Nucleic Acid
  misc_feature: DNAzyme
gatctctgggctagctacaacgaggatctgt

SEQ ID NO: 15618 - DNA, 31 bp, Artificial Sequence
  Description of Artificial Sequence:  Nucleic Acid
  misc_feature: DNAzyme
gtgggggaggctagctacaacgactctgcgg

SEQ ID NO: 15619 - DNA, 31 bp, Artificial Sequence
  Description of Artificial Sequence:  Nucleic Acid
  misc_feature: DNAzyme
tatgtacgggctagctacaacgagggggatc

SEQ ID NO: 15620 - DNA, 31 bp, Artificial Sequence
  Description of Artificial Sequence:  Nucleic Acid
  misc_feature: DNAzyme
gctatgtaggctagctacaacgagtggggga

SEQ ID NO: 15621 - DNA, 31 bp, Artificial Sequence
  Description of Artificial Sequence:  Nucleic Acid
  misc_feature: DNAzyme
ctgctatgggctagctacaacgaacgtgggg

SEQ ID NO: 15622 - DNA, 31 bp, Artificial Sequence
  Description of Artificial Sequence:  Nucleic Acid
  misc_feature: DNAzyme
ctctgctaggctagctacaacgagtacgtgg

SEQ ID NO: 15623 - DNA, 31 bp, Artificial Sequence
  Description of Artificial Sequence:  Nucleic Acid
  misc_feature: DNAzyme
ctgctctgggctagctacaacgatatgtacg

SEQ ID NO: 15624 - DNA, 31 bp, Artificial Sequence
  Description of Artificial Sequence:  Nucleic Acid
  misc_feature: DNAzyme
gctttctgggctagctacaacgatctgctat

SEQ ID NO: 15625 - DNA, 31 bp, Artificial Sequence
  Description of Artificial Sequence:  Nucleic Acid
  misc_feature: DNAzyme
ggcggctgggctagctacaacgatttctgct

SEQ ID NO: 15626 - DNA, 31 bp, Artificial Sequence
  Description of Artificial Sequence:  Nucleic Acid
  misc_feature: DNAzyme
tggggcggggctagctacaacgatgctttct

SEQ ID NO: 15627 - DNA, 31 bp, Artificial Sequence
  Description of Artificial Sequence:  Nucleic Acid
  misc_feature: DNAzyme
cgttggggggctagctacaacgaggctgctt

SEQ ID NO: 15628 - DNA, 31 bp, Artificial Sequence
  Description of Artificial Sequence:  Nucleic Acid
  misc_feature: DNAzyme
tttgctcgggctagctacaacgatggggcgg

SEQ ID NO: 15629 - DNA, 31 bp, Artificial Sequence
  Description of Artificial Sequence:  Nucleic Acid
  misc_feature: DNAzyme
tcgatttgggctagctacaacgatcgttggg

SEQ ID NO: 15630 - DNA, 31 bp, Artificial Sequence
  Description of Artificial Sequence:  Nucleic Acid
  misc_feature: DNAzyme
cacgtcgaggctagctacaacgattgctcgt

SEQ ID NO: 15631 - DNA, 31 bp, Artificial Sequence
  Description of Artificial Sequence:  Nucleic Acid
  misc_feature: DNAzyme
gcgtcacgggctagctacaacgacgatttgc

SEQ ID NO: 15632 - DNA, 31 bp, Artificial Sequence
  Description of Artificial Sequence:  Nucleic Acid
  misc_feature: DNAzyme
cggcgtcaggctagctacaacgagtcgattt

SEQ ID NO: 15633 - DNA, 31 bp, Artificial Sequence
  Description of Artificial Sequence:  Nucleic Acid
  misc_feature: DNAzyme
atacggcgggctagctacaacgacacgtcga

SEQ ID NO: 15634 - DNA, 31 bp, Artificial Sequence
  Description of Artificial Sequence:  Nucleic Acid
  misc_feature: DNAzyme
cgatacggggctagctacaacgagtcacgtc

SEQ ID NO: 15635 - DNA, 31 bp, Artificial Sequence
  Description of Artificial Sequence:  Nucleic Acid
  misc_feature: DNAzyme
cgacgataggctagctacaacgaggcgtcac

SEQ ID NO: 15636 - DNA, 31 bp, Artificial Sequence
  Description of Artificial Sequence:  Nucleic Acid
  misc_feature: DNAzyme
tacgacgaggctagctacaacgaacggcgtc

SEQ ID NO: 15637 - DNA, 31 bp, Artificial Sequence
  Description of Artificial Sequence:  Nucleic Acid
  misc_feature: DNAzyme
cactacgaggctagctacaacgagatacggc

SEQ ID NO: 15638 - DNA, 31 bp, Artificial Sequence
  Description of Artificial Sequence:  Nucleic Acid
  misc_feature: DNAzyme
ccccactaggctagctacaacgagacgatac

SEQ ID NO: 15639 - DNA, 31 bp, Artificial Sequence
  Description of Artificial Sequence:  Nucleic Acid
  misc_feature: DNAzyme
catccccaggctagctacaacgatacgacga

SEQ ID NO: 15640 - DNA, 31 bp, Artificial Sequence
  Description of Artificial Sequence:  Nucleic Acid
  misc_feature: DNAzyme
tgccagcaggctagctacaacgaccccacta

SEQ ID NO: 15641 - DNA, 31 bp, Artificial Sequence
  Description of Artificial Sequence:  Nucleic Acid
  misc_feature: DNAzyme
aatgccagggctagctacaacgaatccccac

SEQ ID NO: 15642 - DNA, 31 bp, Artificial Sequence
  Description of Artificial Sequence:  Nucleic Acid
  misc_feature: DNAzyme
caggaatgggctagctacaacgacagcatcc

SEQ ID NO: 15643 - DNA, 31 bp, Artificial Sequence
  Description of Artificial Sequence:  Nucleic Acid
  misc_feature: DNAzyme
gccaggaaggctagctacaacgagccagcat

SEQ ID NO: 15644 - DNA, 31 bp, Artificial Sequence
  Description of Artificial Sequence:  Nucleic Acid
  misc_feature: DNAzyme
gctcgcggggctagctacaacgacaggaatg

SEQ ID NO: 15645 - DNA, 31 bp, Artificial Sequence
  Description of Artificial Sequence:  Nucleic Acid
  misc_feature: DNAzyme
cacgctcgggctagctacaacgaggccagga

SEQ ID NO: 15646 - DNA, 31 bp, Artificial Sequence
  Description of Artificial Sequence:  Nucleic Acid
  misc_feature: DNAzyme
ctcccacgggctagctacaacgatcgcggcc

SEQ ID NO: 15647 - DNA, 31 bp, Artificial Sequence
  Description of Artificial Sequence:  Nucleic Acid
  misc_feature: DNAzyme
cactcccaggctagctacaacgagctcgcgg

SEQ ID NO: 15648 - DNA, 31 bp, Artificial Sequence
  Description of Artificial Sequence:  Nucleic Acid
  misc_feature: DNAzyme
agcgctcaggctagctacaacgatcccacgc

SEQ ID NO: 15649 - DNA, 31 bp, Artificial Sequence
  Description of Artificial Sequence:  Nucleic Acid
  misc_feature: DNAzyme
gggtagcgggctagctacaacgatcactccc

SEQ ID NO: 15650 - DNA, 31 bp, Artificial Sequence
  Description of Artificial Sequence:  Nucleic Acid
  misc_feature: DNAzyme
ctgggtagggctagctacaacgagctcactc

SEQ ID NO: 15651 - DNA, 31 bp, Artificial Sequence
  Description of Artificial Sequence:  Nucleic Acid
  misc_feature: DNAzyme
ctgctgggggctagctacaacgaagcgctca

SEQ ID NO: 15652 - DNA, 31 bp, Artificial Sequence
  Description of Artificial Sequence:  Nucleic Acid
  misc_feature: DNAzyme
tcccgctgggctagctacaacgatgggtagc

SEQ ID NO: 15653 - DNA, 31 bp, Artificial Sequence
  Description of Artificial Sequence:  Nucleic Acid
  misc_feature: DNAzyme
tcctcccgggctagctacaacgatgctgggt

SEQ ID NO: 15654 - DNA, 31 bp, Artificial Sequence
  Description of Artificial Sequence:  Nucleic Acid
  misc_feature: DNAzyme
gagaacaaggctagctacaacgatcctcccg

SEQ ID NO: 15655 - DNA, 31 bp, Artificial Sequence
  Description of Artificial Sequence:  Nucleic Acid
  misc_feature: DNAzyme
cgggagaaggctagctacaacgaaactcctc

SEQ ID NO: 15656 - DNA, 31 bp, Artificial Sequence
  Description of Artificial Sequence:  Nucleic Acid
  misc_feature: DNAzyme
gccctgcgggctagctacaacgatcgggaga

SEQ ID NO: 15657 - DNA, 31 bp, Artificial Sequence
  Description of Artificial Sequence:  Nucleic Acid
  misc_feature: DNAzyme
gtgccctgggctagctacaacgagttcggga

SEQ ID NO: 15658 - DNA, 31 bp, Artificial Sequence
  Description of Artificial Sequence:  Nucleic Acid
  misc_feature: DNAzyme
ggtgcgtgggctagctacaacgacctgcgtt

SEQ ID NO: 15659 - DNA, 31 bp, Artificial Sequence
  Description of Artificial Sequence:  Nucleic Acid
  misc_feature: DNAzyme
ggggtgcgggctagctacaacgagccctgcg

SEQ ID NO: 15660 - DNA, 31 bp, Artificial Sequence
  Description of Artificial Sequence:  Nucleic Acid
  misc_feature: DNAzyme
ccggggtgggctagctacaacgagtgccctg

SEQ ID NO: 15661 - DNA, 31 bp, Artificial Sequence
  Description of Artificial Sequence:  Nucleic Acid
  misc_feature: DNAzyme
ccccggggggctagctacaacgagcgtgccc

SEQ ID NO: 15662 - DNA, 31 bp, Artificial Sequence
  Description of Artificial Sequence:  Nucleic Acid
  misc_feature: DNAzyme
catgcacaggctagctacaacgacccggggt

SEQ ID NO: 15663 - DNA, 31 bp, Artificial Sequence
  Description of Artificial Sequence:  Nucleic Acid
  misc_feature: DNAzyme
atcatgcaggctagctacaacgaaccccggg

SEQ ID NO: 15664 - DNA, 31 bp, Artificial Sequence
  Description of Artificial Sequence:  Nucleic Acid
  misc_feature: DNAzyme
tgatcatgggctagctacaacgaacaccccg

SEQ ID NO: 15665 - DNA, 31 bp, Artificial Sequence
  Description of Artificial Sequence:  Nucleic Acid
  misc_feature: DNAzyme
catgatcaggctagctacaacgagcacaccc

SEQ ID NO: 15666 - DNA, 31 bp, Artificial Sequence
  Description of Artificial Sequence:  Nucleic Acid
  misc_feature: DNAzyme
ggacatgaggctagctacaacgacatgcaca

SEQ ID NO: 15667 - DNA, 31 bp, Artificial Sequence
  Description of Artificial Sequence:  Nucleic Acid
  misc_feature: DNAzyme
agaggacaggctagctacaacgagatcatgc

SEQ ID NO: 15668 - DNA, 31 bp, Artificial Sequence
  Description of Artificial Sequence:  Nucleic Acid
  misc_feature: DNAzyme
gcagaggaggctagctacaacgaatgatcat

SEQ ID NO: 15669 - DNA, 31 bp, Artificial Sequence
  Description of Artificial Sequence:  Nucleic Acid
  misc_feature: DNAzyme
gtatgaggggctagctacaacgaagaggaca

SEQ ID NO: 15670 - DNA, 31 bp, Artificial Sequence
  Description of Artificial Sequence:  Nucleic Acid
  misc_feature: DNAzyme
attgtgtaggctagctacaacgagaggcaga

SEQ ID NO: 15671 - DNA, 31 bp, Artificial Sequence
  Description of Artificial Sequence:  Nucleic Acid
  misc_feature: DNAzyme
gcattgtgggctagctacaacgaatgaggca

SEQ ID NO: 15672 - DNA, 31 bp, Artificial Sequence
  Description of Artificial Sequence:  Nucleic Acid
  misc_feature: DNAzyme
aagcattgggctagctacaacgagtatgagg

SEQ ID NO: 15673 - DNA, 31 bp, Artificial Sequence
  Description of Artificial Sequence:  Nucleic Acid
  misc_feature: DNAzyme
ctcaagcaggctagctacaacgatgtgtatg

SEQ ID NO: 15674 - DNA, 31 bp, Artificial Sequence
  Description of Artificial Sequence:  Nucleic Acid
  misc_feature: DNAzyme
aactcaagggctagctacaacgaattgtgta

SEQ ID NO: 15675 - DNA, 31 bp, Artificial Sequence
  Description of Artificial Sequence:  Nucleic Acid
  misc_feature: DNAzyme
tgctccaaggctagctacaacgatcaagcat

SEQ ID NO: 15676 - DNA, 31 bp, Artificial Sequence
  Description of Artificial Sequence:  Nucleic Acid
  misc_feature: DNAzyme
aacgattgggctagctacaacgatccaactc

SEQ ID NO: 15677 - DNA, 31 bp, Artificial Sequence
  Description of Artificial Sequence:  Nucleic Acid
  misc_feature: DNAzyme
acgaacgaggctagctacaacgatgctccaa

SEQ ID NO: 15678 - DNA, 31 bp, Artificial Sequence
  Description of Artificial Sequence:  Nucleic Acid
  misc_feature: DNAzyme
gtcacgaaggctagctacaacgagattgctc

SEQ ID NO: 15679 - DNA, 31 bp, Artificial Sequence
  Description of Artificial Sequence:  Nucleic Acid
  misc_feature: DNAzyme
ccatgtcaggctagctacaacgagaacgatt

SEQ ID NO: 15680 - DNA, 31 bp, Artificial Sequence
  Description of Artificial Sequence:  Nucleic Acid
  misc_feature: DNAzyme
gtaccatgggctagctacaacgacacgaacg

SEQ ID NO: 15681 - DNA, 31 bp, Artificial Sequence
  Description of Artificial Sequence:  Nucleic Acid
  misc_feature: DNAzyme
ctgtaccaggctagctacaacgagtcacgaa

SEQ ID NO: 15682 - DNA, 31 bp, Artificial Sequence
  Description of Artificial Sequence:  Nucleic Acid
  misc_feature: DNAzyme
gggctgtaggctagctacaacgacatgtcac

SEQ ID NO: 15683 - DNA, 31 bp, Artificial Sequence
  Description of Artificial Sequence:  Nucleic Acid
  misc_feature: DNAzyme
ccgggctgggctagctacaacgaaccatgtc

SEQ ID NO: 15684 - DNA, 31 bp, Artificial Sequence
  Description of Artificial Sequence:  Nucleic Acid
  misc_feature: DNAzyme
cgtccgggggctagctacaacgatgtaccat

SEQ ID NO: 15685 - DNA, 31 bp, Artificial Sequence
  Description of Artificial Sequence:  Nucleic Acid
  misc_feature: DNAzyme
gcaacgcgggctagctacaacgaccgggctg

SEQ ID NO: 15686 - DNA, 31 bp, Artificial Sequence
  Description of Artificial Sequence:  Nucleic Acid
  misc_feature: DNAzyme
gtgcaacgggctagctacaacgagtccgggc

SEQ ID NO: 15687 - DNA, 31 bp, Artificial Sequence
  Description of Artificial Sequence:  Nucleic Acid
  misc_feature: DNAzyme
gtgtgcaaggctagctacaacgagcgtccgg

SEQ ID NO: 15688 - DNA, 31 bp, Artificial Sequence
  Description of Artificial Sequence:  Nucleic Acid
  misc_feature: DNAzyme
gaggtgtgggctagctacaacgaaacgcgtc

SEQ ID NO: 15689 - DNA, 31 bp, Artificial Sequence
  Description of Artificial Sequence:  Nucleic Acid
  misc_feature: DNAzyme
atgaggtgggctagctacaacgagcaacgcg

SEQ ID NO: 15690 - DNA, 31 bp, Artificial Sequence
  Description of Artificial Sequence:  Nucleic Acid
  misc_feature: DNAzyme
ttatgaggggctagctacaacgagtgcaacg

SEQ ID NO: 15691 - DNA, 31 bp, Artificial Sequence
  Description of Artificial Sequence:  Nucleic Acid
  misc_feature: DNAzyme
tccgcttaggctagctacaacgagaggtgtg

SEQ ID NO: 15692 - DNA, 31 bp, Artificial Sequence
  Description of Artificial Sequence:  Nucleic Acid
  misc_feature: DNAzyme
agcctccgggctagctacaacgattatgagg

SEQ ID NO: 15693 - DNA, 31 bp, Artificial Sequence
  Description of Artificial Sequence:  Nucleic Acid
  misc_feature: DNAzyme
catcccagggctagctacaacgactccgctt

SEQ ID NO: 15694 - DNA, 31 bp, Artificial Sequence
  Description of Artificial Sequence:  Nucleic Acid
  misc_feature: DNAzyme
tctgaccaggctagctacaacgacccagcct

SEQ ID NO: 15695 - DNA, 31 bp, Artificial Sequence
  Description of Artificial Sequence:  Nucleic Acid
  misc_feature: DNAzyme
ctgtctgaggctagctacaacgacatcccag

SEQ ID NO: 15696 - DNA, 31 bp, Artificial Sequence
  Description of Artificial Sequence:  Nucleic Acid
  misc_feature: DNAzyme
ctgccctgggctagctacaacgactgaccat

SEQ ID NO: 15697 - DNA, 31 bp, Artificial Sequence
  Description of Artificial Sequence:  Nucleic Acid
  misc_feature: DNAzyme
ctctgctgggctagctacaacgacctgtctg

SEQ ID NO: 15698 - DNA, 31 bp, Artificial Sequence
  Description of Artificial Sequence:  Nucleic Acid
  misc_feature: DNAzyme
tggctctgggctagctacaacgatgccctgt

SEQ ID NO: 15699 - DNA, 31 bp, Artificial Sequence
  Description of Artificial Sequence:  Nucleic Acid
  misc_feature: DNAzyme
cctcttggggctagctacaacgatctgctgc

SEQ ID NO: 15700 - DNA, 31 bp, Artificial Sequence
  Description of Artificial Sequence:  Nucleic Acid
  misc_feature: DNAzyme
tttctctaggctagctacaacgacttcctct

SEQ ID NO: 15701 - DNA, 31 bp, Artificial Sequence
  Description of Artificial Sequence:  Nucleic Acid
  misc_feature: DNAzyme
cccggttgggctagctacaacgatctttctc

SEQ ID NO: 15702 - DNA, 31 bp, Artificial Sequence
  Description of Artificial Sequence:  Nucleic Acid
  misc_feature: DNAzyme
ctgcccggggctagctacaacgatgctcttt

SEQ ID NO: 15703 - DNA, 31 bp, Artificial Sequence
  Description of Artificial Sequence:  Nucleic Acid
  misc_feature: DNAzyme
ggaatctgggctagctacaacgaccggttgc

SEQ ID NO: 15704 - DNA, 31 bp, Artificial Sequence
  Description of Artificial Sequence:  Nucleic Acid
  misc_feature: DNAzyme
acagggaaggctagctacaacgactgcccgg

SEQ ID NO: 15705 - DNA, 31 bp, Artificial Sequence
  Description of Artificial Sequence:  Nucleic Acid
  misc_feature: DNAzyme
ctatgcaaggctagctacaacgaagggaatc

SEQ ID NO: 15706 - DNA, 31 bp, Artificial Sequence
  Description of Artificial Sequence:  Nucleic Acid
  misc_feature: DNAzyme
gaactatgggctagctacaacgaaacaggga

SEQ ID NO: 15707 - DNA, 31 bp, Artificial Sequence
  Description of Artificial Sequence:  Nucleic Acid
  misc_feature: DNAzyme
gtgaactaggctagctacaacgagcaacagg

SEQ ID NO: 15708 - DNA, 31 bp, Artificial Sequence
  Description of Artificial Sequence:  Nucleic Acid
  misc_feature: DNAzyme
ggcgtgaaggctagctacaacgatatgcaac

SEQ ID NO: 15709 - DNA, 31 bp, Artificial Sequence
  Description of Artificial Sequence:  Nucleic Acid
  misc_feature: DNAzyme
agacggcgggctagctacaacgagaactatg

SEQ ID NO: 15710 - DNA, 31 bp, Artificial Sequence
  Description of Artificial Sequence:  Nucleic Acid
  misc_feature: DNAzyme
gaagacggggctagctacaacgagtgaacta

SEQ ID NO: 15711 - DNA, 31 bp, Artificial Sequence
  Description of Artificial Sequence:  Nucleic Acid
  misc_feature: DNAzyme
ctggaagaggctagctacaacgaggcgtgaa

SEQ ID NO: 15712 - DNA, 31 bp, Artificial Sequence
  Description of Artificial Sequence:  Nucleic Acid
  misc_feature: DNAzyme
cgtccgggggctagctacaacgatctggaag

SEQ ID NO: 15713 - DNA, 31 bp, Artificial Sequence
  Description of Artificial Sequence:  Nucleic Acid
  misc_feature: DNAzyme
gcatggcgggctagctacaacgaccgggttc

SEQ ID NO: 15714 - DNA, 31 bp, Artificial Sequence
  Description of Artificial Sequence:  Nucleic Acid
  misc_feature: DNAzyme
gcgcatggggctagctacaacgagtccgggt

SEQ ID NO: 15715 - DNA, 31 bp, Artificial Sequence
  Description of Artificial Sequence:  Nucleic Acid
  misc_feature: DNAzyme
ctggcgcaggctagctacaacgaggcgtccg

SEQ ID NO: 15716 - DNA, 31 bp, Artificial Sequence
  Description of Artificial Sequence:  Nucleic Acid
  misc_feature: DNAzyme
ccctggcgggctagctacaacgaatggcgtc

SEQ ID NO: 15717 - DNA, 31 bp, Artificial Sequence
  Description of Artificial Sequence:  Nucleic Acid
  misc_feature: DNAzyme
ggccctggggctagctacaacgagcatggcg

SEQ ID NO: 15718 - DNA, 31 bp, Artificial Sequence
  Description of Artificial Sequence:  Nucleic Acid
  misc_feature: DNAzyme
tgccagggggctagctacaacgacctggcgc

SEQ ID NO: 15719 - DNA, 31 bp, Artificial Sequence
  Description of Artificial Sequence:  Nucleic Acid
  misc_feature: DNAzyme
aggcactgggctagctacaacgacagggccc

SEQ ID NO: 15720 - DNA, 31 bp, Artificial Sequence
  Description of Artificial Sequence:  Nucleic Acid
  misc_feature: DNAzyme
gggaggcaggctagctacaacgatgccaggg

SEQ ID NO: 15721 - DNA, 31 bp, Artificial Sequence
  Description of Artificial Sequence:  Nucleic Acid
  misc_feature: DNAzyme
ttgggaggggctagctacaacgaactgccag

SEQ ID NO: 15722 - DNA, 31 bp, Artificial Sequence
  Description of Artificial Sequence:  Nucleic Acid
  misc_feature: DNAzyme
cgtcggcgggctagctacaacgaccccttgg

SEQ ID NO: 15723 - DNA, 31 bp, Artificial Sequence
  Description of Artificial Sequence:  Nucleic Acid
  misc_feature: DNAzyme
ctcgtcggggctagctacaacgagccccctt

SEQ ID NO: 15724 - DNA, 31 bp, Artificial Sequence
  Description of Artificial Sequence:  Nucleic Acid
  misc_feature: DNAzyme
tccgctcgggctagctacaacgacggcgccc

SEQ ID NO: 15725 - DNA, 31 bp, Artificial Sequence
  Description of Artificial Sequence:  Nucleic Acid
  misc_feature: DNAzyme
acattccgggctagctacaacgatcgtcggc

SEQ ID NO: 15726 - DNA, 31 bp, Artificial Sequence
  Description of Artificial Sequence:  Nucleic Acid
  misc_feature: DNAzyme
ggggtacaggctagctacaacgatccgctcg

SEQ ID NO: 15727 - DNA, 31 bp, Artificial Sequence
  Description of Artificial Sequence:  Nucleic Acid
  misc_feature: DNAzyme
atggggtaggctagctacaacgaattccgct

SEQ ID NO: 15728 - DNA, 31 bp, Artificial Sequence
  Description of Artificial Sequence:  Nucleic Acid
  misc_feature: DNAzyme
tcatggggggctagctacaacgaacattccg

SEQ ID NO: 15729 - DNA, 31 bp, Artificial Sequence
  Description of Artificial Sequence:  Nucleic Acid
  misc_feature: DNAzyme
cgacctcaggctagctacaacgaggggtaca

SEQ ID NO: 15730 - DNA, 31 bp, Artificial Sequence
  Description of Artificial Sequence:  Nucleic Acid
  misc_feature: DNAzyme
ttcgccgaggctagctacaacgactcatggg

SEQ ID NO: 15731 - DNA, 31 bp, Artificial Sequence
  Description of Artificial Sequence:  Nucleic Acid
  misc_feature: DNAzyme
cggcttcgggctagctacaacgacgacctca

SEQ ID NO: 15732 - DNA, 31 bp, Artificial Sequence
  Description of Artificial Sequence:  Nucleic Acid
  misc_feature: DNAzyme
acatgcggggctagctacaacgattcgccga

SEQ ID NO: 15733 - DNA, 31 bp, Artificial Sequence
  Description of Artificial Sequence:  Nucleic Acid
  misc_feature: DNAzyme
ctcacatgggctagctacaacgaggcttcgc

SEQ ID NO: 15734 - DNA, 31 bp, Artificial Sequence
  Description of Artificial Sequence:  Nucleic Acid
  misc_feature: DNAzyme
ccctcacaggctagctacaacgagcggcttc

SEQ ID NO: 15735 - DNA, 31 bp, Artificial Sequence
  Description of Artificial Sequence:  Nucleic Acid
  misc_feature: DNAzyme
taccctcaggctagctacaacgaatgcggct

SEQ ID NO: 15736 - DNA, 31 bp, Artificial Sequence
  Description of Artificial Sequence:  Nucleic Acid
  misc_feature: DNAzyme
catcgataggctagctacaacgacctcacat

SEQ ID NO: 15737 - DNA, 31 bp, Artificial Sequence
  Description of Artificial Sequence:  Nucleic Acid
  misc_feature: DNAzyme
gtcatcgaggctagctacaacgaaccctcac

SEQ ID NO: 15738 - DNA, 31 bp, Artificial Sequence
  Description of Artificial Sequence:  Nucleic Acid
  misc_feature: DNAzyme
taaggtcaggctagctacaacgacgataccc

SEQ ID NO: 15739 - DNA, 31 bp, Artificial Sequence
  Description of Artificial Sequence:  Nucleic Acid
  misc_feature: DNAzyme
gggtaaggggctagctacaacgacatcgata

SEQ ID NO: 15740 - DNA, 31 bp, Artificial Sequence
  Description of Artificial Sequence:  Nucleic Acid
  misc_feature: DNAzyme
aacttgggggctagctacaacgaaaggtcat

SEQ ID NO: 15741 - DNA, 31 bp, Artificial Sequence
  Description of Artificial Sequence:  Nucleic Acid
  misc_feature: DNAzyme
tcgcgtaaggctagctacaacgattgggtaa

SEQ ID NO: 15742 - DNA, 31 bp, Artificial Sequence
  Description of Artificial Sequence:  Nucleic Acid
  misc_feature: DNAzyme
aggtcgcgggctagctacaacgaaacttggg

SEQ ID NO: 15743 - DNA, 31 bp, Artificial Sequence
  Description of Artificial Sequence:  Nucleic Acid
  misc_feature: DNAzyme
gtaggtcgggctagctacaacgagtaacttg

SEQ ID NO: 15744 - DNA, 31 bp, Artificial Sequence
  Description of Artificial Sequence:  Nucleic Acid
  misc_feature: DNAzyme
ggcgtaggggctagctacaacgacgcgtaac

SEQ ID NO: 15745 - DNA, 31 bp, Artificial Sequence
  Description of Artificial Sequence:  Nucleic Acid
  misc_feature: DNAzyme
ccccggcgggctagctacaacgaaggtcgcg

SEQ ID NO: 15746 - DNA, 31 bp, Artificial Sequence
  Description of Artificial Sequence:  Nucleic Acid
  misc_feature: DNAzyme
acccccggggctagctacaacgagtaggtcg

SEQ ID NO: 15747 - DNA, 31 bp, Artificial Sequence
  Description of Artificial Sequence:  Nucleic Acid
  misc_feature: DNAzyme
cccacggaggctagctacaacgaccccggcg

SEQ ID NO: 15748 - DNA, 31 bp, Artificial Sequence
  Description of Artificial Sequence:  Nucleic Acid
  misc_feature: DNAzyme
gggccccaggctagctacaacgaggaccccc

SEQ ID NO: 15749 - DNA, 31 bp, Artificial Sequence
  Description of Artificial Sequence:  Nucleic Acid
  misc_feature: DNAzyme
agttggggggctagctacaacgacccacgga

SEQ ID NO: 15750 - DNA, 31 bp, Artificial Sequence
  Description of Artificial Sequence:  Nucleic Acid
  misc_feature: DNAzyme
cggcctagggctagctacaacgatggggccc

SEQ ID NO: 15751 - DNA, 31 bp, Artificial Sequence
  Description of Artificial Sequence:  Nucleic Acid
  misc_feature: DNAzyme
gctcccggggctagctacaacgactagttgg

SEQ ID NO: 15752 - DNA, 31 bp, Artificial Sequence
  Description of Artificial Sequence:  Nucleic Acid
  misc_feature: DNAzyme
ccccgcggggctagctacaacgatcccggcc

SEQ ID NO: 15753 - DNA, 31 bp, Artificial Sequence
  Description of Artificial Sequence:  Nucleic Acid
  misc_feature: DNAzyme
tcaccccgggctagctacaacgaggctcccg

SEQ ID NO: 15754 - DNA, 31 bp, Artificial Sequence
  Description of Artificial Sequence:  Nucleic Acid
  misc_feature: DNAzyme
tcctgtcaggctagctacaacgacccgcggc

SEQ ID NO: 15755 - DNA, 31 bp, Artificial Sequence
  Description of Artificial Sequence:  Nucleic Acid
  misc_feature: DNAzyme
ggctcctgggctagctacaacgacaccccgc

SEQ ID NO: 15756 - DNA, 31 bp, Artificial Sequence
  Description of Artificial Sequence:  Nucleic Acid
  misc_feature: DNAzyme
caggatggggctagctacaacgatcctgtca

SEQ ID NO: 15757 - DNA, 31 bp, Artificial Sequence
  Description of Artificial Sequence:  Nucleic Acid
  misc_feature: DNAzyme
gggcaggaggctagctacaacgaggctcctg

SEQ ID NO: 15758 - DNA, 31 bp, Artificial Sequence
  Description of Artificial Sequence:  Nucleic Acid
  misc_feature: DNAzyme
agggtgggggctagctacaacgaaggatggc

SEQ ID NO: 15759 - DNA, 31 bp, Artificial Sequence
  Description of Artificial Sequence:  Nucleic Acid
  misc_feature: DNAzyme
gcttagggggctagctacaacgagggcagga

SEQ ID NO: 15760 - DNA, 31 bp, Artificial Sequence
  Description of Artificial Sequence:  Nucleic Acid
  misc_feature: DNAzyme
aatgagggggctagctacaacgattagggtg

SEQ ID NO: 15761 - DNA, 31 bp, Artificial Sequence
  Description of Artificial Sequence:  Nucleic Acid
  misc_feature: DNAzyme
tatggcaaggctagctacaacgagagggctt

SEQ ID NO: 15762 - DNA, 31 bp, Artificial Sequence
  Description of Artificial Sequence:  Nucleic Acid
  misc_feature: DNAzyme
ctctatggggctagctacaacgaaatgaggg

SEQ ID NO: 15763 - DNA, 31 bp, Artificial Sequence
  Description of Artificial Sequence:  Nucleic Acid
  misc_feature: DNAzyme
cccctctaggctagctacaacgaggcaatga

SEQ ID NO: 15764 - DNA, 31 bp, Artificial Sequence
  Description of Artificial Sequence:  Nucleic Acid
  misc_feature: DNAzyme
acccttggggctagctacaacgaccctctat

SEQ ID NO: 15765 - DNA, 31 bp, Artificial Sequence
  Description of Artificial Sequence:  Nucleic Acid
  misc_feature: DNAzyme
cccgggtaggctagctacaacgaccttggcc

SEQ ID NO: 15766 - DNA, 31 bp, Artificial Sequence
  Description of Artificial Sequence:  Nucleic Acid
  misc_feature: DNAzyme
agcccgggggctagctacaacgaacccttgg

SEQ ID NO: 15767 - DNA, 31 bp, Artificial Sequence
  Description of Artificial Sequence:  Nucleic Acid
  misc_feature: DNAzyme
gggctcagggctagctacaacgaccgggtac

SEQ ID NO: 15768 - DNA, 31 bp, Artificial Sequence
  Description of Artificial Sequence:  Nucleic Acid
  misc_feature: DNAzyme
ggcctgggggctagctacaacgatcagcccg

SEQ ID NO: 15769 - DNA, 31 bp, Artificial Sequence
  Description of Artificial Sequence:  Nucleic Acid
  misc_feature: DNAzyme
gggcagggggctagctacaacgactgggctc

SEQ ID NO: 15770 - DNA, 31 bp, Artificial Sequence
  Description of Artificial Sequence:  Nucleic Acid
  misc_feature: DNAzyme
cccgagggggctagctacaacgaagggcctg

SEQ ID NO: 15771 - DNA, 31 bp, Artificial Sequence
  Description of Artificial Sequence:  Nucleic Acid
  misc_feature: DNAzyme
ctcgccggggctagctacaacgaccgagggc

SEQ ID NO: 15772 - DNA, 31 bp, Artificial Sequence
  Description of Artificial Sequence:  Nucleic Acid
  misc_feature: DNAzyme
aaggctcgggctagctacaacgacggcccga

SEQ ID NO: 15773 - DNA, 31 bp, Artificial Sequence
  Description of Artificial Sequence:  Nucleic Acid
  misc_feature: DNAzyme
ccccaaggggctagctacaacgatcgccggc

SEQ ID NO: 15774 - DNA, 31 bp, Artificial Sequence
  Description of Artificial Sequence:  Nucleic Acid
  misc_feature: DNAzyme
acaacctaggctagctacaacgaccccaagg

SEQ ID NO: 15775 - DNA, 31 bp, Artificial Sequence
  Description of Artificial Sequence:  Nucleic Acid
  misc_feature: DNAzyme
ggcgacaaggctagctacaacgactatcccc

SEQ ID NO: 15776 - DNA, 31 bp, Artificial Sequence
  Description of Artificial Sequence:  Nucleic Acid
  misc_feature: DNAzyme
gaaggcgaggctagctacaacgaaacctatc

SEQ ID NO: 15777 - DNA, 31 bp, Artificial Sequence
  Description of Artificial Sequence:  Nucleic Acid
  misc_feature: DNAzyme
gtggaaggggctagctacaacgagacaacct

SEQ ID NO: 15778 - DNA, 31 bp, Artificial Sequence
  Description of Artificial Sequence:  Nucleic Acid
  misc_feature: DNAzyme
caacctcgggctagctacaacgaggaaggcg

SEQ ID NO: 15779 - DNA, 31 bp, Artificial Sequence
  Description of Artificial Sequence:  Nucleic Acid
  misc_feature: DNAzyme
ggtcgcaaggctagctacaacgactcgtgga

SEQ ID NO: 15780 - DNA, 31 bp, Artificial Sequence
  Description of Artificial Sequence:  Nucleic Acid
  misc_feature: DNAzyme
agcggtcgggctagctacaacgaaacctcgt

SEQ ID NO: 15781 - DNA, 31 bp, Artificial Sequence
  Description of Artificial Sequence:  Nucleic Acid
  misc_feature: DNAzyme
ccgagcggggctagctacaacgacgcaacct

SEQ ID NO: 15782 - DNA, 31 bp, Artificial Sequence
  Description of Artificial Sequence:  Nucleic Acid
  misc_feature: DNAzyme
cttccgagggctagctacaacgaggtcgcaa

SEQ ID NO: 15783 - DNA, 31 bp, Artificial Sequence
  Description of Artificial Sequence:  Nucleic Acid
  misc_feature: DNAzyme
taggaagaggctagctacaacgattccgagc

SEQ ID NO: 15784 - DNA, 31 bp, Artificial Sequence
  Description of Artificial Sequence:  Nucleic Acid
  misc_feature: DNAzyme
gcgcgcgaggctagctacaacgataggaaga

SEQ ID NO: 15785 - DNA, 31 bp, Artificial Sequence
  Description of Artificial Sequence:  Nucleic Acid
  misc_feature: DNAzyme
tgtgcgcgggctagctacaacgagactagga

SEQ ID NO: 15786 - DNA, 31 bp, Artificial Sequence
  Description of Artificial Sequence:  Nucleic Acid
  misc_feature: DNAzyme
ggtgtgcgggctagctacaacgagcgactag

SEQ ID NO: 15787 - DNA, 31 bp, Artificial Sequence
  Description of Artificial Sequence:  Nucleic Acid
  misc_feature: DNAzyme
tgggtgtgggctagctacaacgagcgcgact

SEQ ID NO: 15788 - DNA, 31 bp, Artificial Sequence
  Description of Artificial Sequence:  Nucleic Acid
  misc_feature: DNAzyme
gttgggtgggctagctacaacgagcgcgcga

SEQ ID NO: 15789 - DNA, 31 bp, Artificial Sequence
  Description of Artificial Sequence:  Nucleic Acid
  misc_feature: DNAzyme
aggttgggggctagctacaacgagtgcgcgc

SEQ ID NO: 15790 - DNA, 31 bp, Artificial Sequence
  Description of Artificial Sequence:  Nucleic Acid
  misc_feature: DNAzyme
gccccaggggctagctacaacgatgggtgtg

SEQ ID NO: 15791 - DNA, 31 bp, Artificial Sequence
  Description of Artificial Sequence:  Nucleic Acid
  misc_feature: DNAzyme
cgcaggggggctagctacaacgacccaggtt

SEQ ID NO: 15792 - DNA, 31 bp, Artificial Sequence
  Description of Artificial Sequence:  Nucleic Acid
  misc_feature: DNAzyme
ttgccgcgggctagctacaacgaaggggccc

SEQ ID NO: 15793 - DNA, 31 bp, Artificial Sequence
  Description of Artificial Sequence:  Nucleic Acid
  misc_feature: DNAzyme
tgttgccgggctagctacaacgagcaggggc

SEQ ID NO: 15794 - DNA, 31 bp, Artificial Sequence
  Description of Artificial Sequence:  Nucleic Acid
  misc_feature: DNAzyme
acctgttgggctagctacaacgacgcgcagg

SEQ ID NO: 15795 - DNA, 31 bp, Artificial Sequence
  Description of Artificial Sequence:  Nucleic Acid
  misc_feature: DNAzyme
tttacctgggctagctacaacgatgccgcgc

SEQ ID NO: 15796 - DNA, 31 bp, Artificial Sequence
  Description of Artificial Sequence:  Nucleic Acid
  misc_feature: DNAzyme
ggagtttaggctagctacaacgactgttgcc

SEQ ID NO: 15797 - DNA, 31 bp, Artificial Sequence
  Description of Artificial Sequence:  Nucleic Acid
  misc_feature: DNAzyme
tggtggagggctagctacaacgattacctgt

SEQ ID NO: 15798 - DNA, 31 bp, Artificial Sequence
  Description of Artificial Sequence:  Nucleic Acid
  misc_feature: DNAzyme
atcgttggggctagctacaacgaggagttta

SEQ ID NO: 15799 - DNA, 31 bp, Artificial Sequence
  Description of Artificial Sequence:  Nucleic Acid
  misc_feature: DNAzyme
tcagatcgggctagctacaacgatggtggag

SEQ ID NO: 15800 - DNA, 31 bp, Artificial Sequence
  Description of Artificial Sequence:  Nucleic Acid
  misc_feature: DNAzyme
tggtcagaggctagctacaacgacgttggtg

SEQ ID NO: 15801 - DNA, 31 bp, Artificial Sequence
  Description of Artificial Sequence:  Nucleic Acid
  misc_feature: DNAzyme
ggcggtggggctagctacaacgacagatcgt

SEQ ID NO: 15802 - DNA, 31 bp, Artificial Sequence
  Description of Artificial Sequence:  Nucleic Acid
  misc_feature: DNAzyme
ccgggcggggctagctacaacgaggtcagat

SEQ ID NO: 15803 - DNA, 31 bp, Artificial Sequence
  Description of Artificial Sequence:  Nucleic Acid
  misc_feature: DNAzyme
ttcccgggggctagctacaacgaggtggtca

SEQ ID NO: 15804 - DNA, 31 bp, Artificial Sequence
  Description of Artificial Sequence:  Nucleic Acid
  misc_feature: DNAzyme
acgtcaagggctagctacaacgatcccgggc

SEQ ID NO: 15805 - DNA, 31 bp, Artificial Sequence
  Description of Artificial Sequence:  Nucleic Acid
  misc_feature: DNAzyme
acaggacgggctagctacaacgacaagttcc

SEQ ID NO: 15806 - DNA, 31 bp, Artificial Sequence
  Description of Artificial Sequence:  Nucleic Acid
  misc_feature: DNAzyme
ccacaggaggctagctacaacgagtcaagtt

SEQ ID NO: 15807 - DNA, 31 bp, Artificial Sequence
  Description of Artificial Sequence:  Nucleic Acid
  misc_feature: DNAzyme
gccgcccaggctagctacaacgaaggacgtc

SEQ ID NO: 15808 - DNA, 31 bp, Artificial Sequence
  Description of Artificial Sequence:  Nucleic Acid
  misc_feature: DNAzyme
aaccgccgggctagctacaacgaccacagga

SEQ ID NO: 15809 - DNA, 31 bp, Artificial Sequence
  Description of Artificial Sequence:  Nucleic Acid
  misc_feature: DNAzyme
accaaccgggctagctacaacgacgcccaca

SEQ ID NO: 15810 - DNA, 31 bp, Artificial Sequence
  Description of Artificial Sequence:  Nucleic Acid
  misc_feature: DNAzyme
aacaccaaggctagctacaacgacgccgccc

SEQ ID NO: 15811 - DNA, 31 bp, Artificial Sequence
  Description of Artificial Sequence:  Nucleic Acid
  misc_feature: DNAzyme
acgtaacaggctagctacaacgacaaccgcc

SEQ ID NO: 15812 - DNA, 31 bp, Artificial Sequence
  Description of Artificial Sequence:  Nucleic Acid
  misc_feature: DNAzyme
aaacgtaaggctagctacaacgaaccaaccg

SEQ ID NO: 15813 - DNA, 31 bp, Artificial Sequence
  Description of Artificial Sequence:  Nucleic Acid
  misc_feature: DNAzyme
accaaacgggctagctacaacgaaacaccaa

SEQ ID NO: 15814 - DNA, 31 bp, Artificial Sequence
  Description of Artificial Sequence:  Nucleic Acid
  misc_feature: DNAzyme
aaaccaaaggctagctacaacgagtaacacc

SEQ ID NO: 15815 - DNA, 31 bp, Artificial Sequence
  Description of Artificial Sequence:  Nucleic Acid
  misc_feature: DNAzyme
aagaaaaaggctagctacaacgacaaacgta

SEQ ID NO: 15816 - DNA, 31 bp, Artificial Sequence
  Description of Artificial Sequence:  Nucleic Acid
  misc_feature: DNAzyme
atcctaaaggctagctacaacgactcaaaga

SEQ ID NO: 15817 - DNA, 31 bp, Artificial Sequence
  Description of Artificial Sequence:  Nucleic Acid
  misc_feature: DNAzyme
agcacgaaggctagctacaacgacctaaacc

SEQ ID NO: 15818 - DNA, 31 bp, Artificial Sequence
  Description of Artificial Sequence:  Nucleic Acid
  misc_feature: DNAzyme
catgagcaggctagctacaacgagaatccta

SEQ ID NO: 15819 - DNA, 31 bp, Artificial Sequence
  Description of Artificial Sequence:  Nucleic Acid
  misc_feature: DNAzyme
accatgagggctagctacaacgaacgaatcc

SEQ ID NO: 15820 - DNA, 31 bp, Artificial Sequence
  Description of Artificial Sequence:  Nucleic Acid
  misc_feature: DNAzyme
gtgcaccaggctagctacaacgagagcacga

SEQ ID NO: 15821 - DNA, 31 bp, Artificial Sequence
  Description of Artificial Sequence:  Nucleic Acid
  misc_feature: DNAzyme
accgtgcaggctagctacaacgacatgagca

SEQ ID NO: 15822 - DNA, 31 bp, Artificial Sequence
  Description of Artificial Sequence:  Nucleic Acid
  misc_feature: DNAzyme
agaccgtgggctagctacaacgaaccatgag

SEQ ID NO: 15823 - DNA, 31 bp, Artificial Sequence
  Description of Artificial Sequence:  Nucleic Acid
  misc_feature: DNAzyme
gtagaccgggctagctacaacgagcaccatg

SEQ ID NO: 15824 - DNA, 31 bp, Artificial Sequence
  Description of Artificial Sequence:  Nucleic Acid
  misc_feature: DNAzyme
ctcgtagaggctagctacaacgacgtgcacc

SEQ ID NO: 15825 - DNA, 31 bp, Artificial Sequence
  Description of Artificial Sequence:  Nucleic Acid
  misc_feature: DNAzyme
aggtctcgggctagctacaacgaagaccgtg

SEQ ID NO: 15826 - DNA, 31 bp, Artificial Sequence
  Description of Artificial Sequence:  Nucleic Acid
  misc_feature: DNAzyme
ccgggaggggctagctacaacgactcgtaga

SEQ ID NO: 15827 - DNA, 31 bp, Artificial Sequence
  Description of Artificial Sequence:  Nucleic Acid
  misc_feature: DNAzyme
tgcgagtgggctagctacaacgacccgggag

SEQ ID NO: 15828 - DNA, 31 bp, Artificial Sequence
  Description of Artificial Sequence:  Nucleic Acid
  misc_feature: DNAzyme
cttgcgagggctagctacaacgagccccggg

SEQ ID NO: 15829 - DNA, 31 bp, Artificial Sequence
  Description of Artificial Sequence:  Nucleic Acid
  misc_feature: DNAzyme
ggtgcttgggctagctacaacgagagtgccc

SEQ ID NO: 15830 - DNA, 31 bp, Artificial Sequence
  Description of Artificial Sequence:  Nucleic Acid
  misc_feature: DNAzyme
atagggtgggctagctacaacgattgcgagt

SEQ ID NO: 15831 - DNA, 31 bp, Artificial Sequence
  Description of Artificial Sequence:  Nucleic Acid
  misc_feature: DNAzyme
tgatagggggctagctacaacgagcttgcga

SEQ ID NO: 15832 - DNA, 31 bp, Artificial Sequence
  Description of Artificial Sequence:  Nucleic Acid
  misc_feature: DNAzyme
ctgcctgaggctagctacaacgaagggtgct

SEQ ID NO: 15833 - DNA, 31 bp, Artificial Sequence
  Description of Artificial Sequence:  Nucleic Acid
  misc_feature: DNAzyme
tggtactgggctagctacaacgactgatagg

SEQ ID NO: 15834 - DNA, 31 bp, Artificial Sequence
  Description of Artificial Sequence:  Nucleic Acid
  misc_feature: DNAzyme
ttgtggtaggctagctacaacgatgcctgat

SEQ ID NO: 15835 - DNA, 31 bp, Artificial Sequence
  Description of Artificial Sequence:  Nucleic Acid
  misc_feature: DNAzyme
ccttgtggggctagctacaacgaactgcctg

SEQ ID NO: 15836 - DNA, 31 bp, Artificial Sequence
  Description of Artificial Sequence:  Nucleic Acid
  misc_feature: DNAzyme
aggccttgggctagctacaacgaggtactgc

SEQ ID NO: 15837 - DNA, 31 bp, Artificial Sequence
  Description of Artificial Sequence:  Nucleic Acid
  misc_feature: DNAzyme
gcgaaaggggctagctacaacgacttgtggt

SEQ ID NO: 15838 - DNA, 31 bp, Artificial Sequence
  Description of Artificial Sequence:  Nucleic Acid
  misc_feature: DNAzyme
ttgggtcgggctagctacaacgagaaaggcc

SEQ ID NO: 15839 - DNA, 31 bp, Artificial Sequence
  Description of Artificial Sequence:  Nucleic Acid
  misc_feature: DNAzyme
gtgttgggggctagctacaacgacgcgaaag

SEQ ID NO: 15840 - DNA, 31 bp, Artificial Sequence
  Description of Artificial Sequence:  Nucleic Acid
  misc_feature: DNAzyme
gagtagtgggctagctacaacgatgggtcgc

SEQ ID NO: 15841 - DNA, 31 bp, Artificial Sequence
  Description of Artificial Sequence:  Nucleic Acid
  misc_feature: DNAzyme
ccgagtagggctagctacaacgagttgggtc

SEQ ID NO: 15842 - DNA, 31 bp, Artificial Sequence
  Description of Artificial Sequence:  Nucleic Acid
  misc_feature: DNAzyme
tagccgagggctagctacaacgaagtgttgg

SEQ ID NO: 15843 - DNA, 31 bp, Artificial Sequence
  Description of Artificial Sequence:  Nucleic Acid
  misc_feature: DNAzyme
actgctagggctagctacaacgacgagtagt

SEQ ID NO: 15844 - DNA, 31 bp, Artificial Sequence
  Description of Artificial Sequence:  Nucleic Acid
  misc_feature: DNAzyme
cgagactgggctagctacaacgatagccgag

SEQ ID NO: 15845 - DNA, 31 bp, Artificial Sequence
  Description of Artificial Sequence:  Nucleic Acid
  misc_feature: DNAzyme
ccgcgagaggctagctacaacgatgctagcc

SEQ ID NO: 15846 - DNA, 31 bp, Artificial Sequence
  Description of Artificial Sequence:  Nucleic Acid
  misc_feature: DNAzyme
tgcccccgggctagctacaacgagagactgc

SEQ ID NO: 15847 - DNA, 31 bp, Artificial Sequence
  Description of Artificial Sequence:  Nucleic Acid
  misc_feature: DNAzyme
tgggcgtgggctagctacaacgaccccgcga

SEQ ID NO: 15848 - DNA, 31 bp, Artificial Sequence
  Description of Artificial Sequence:  Nucleic Acid
  misc_feature: DNAzyme
tttgggcgggctagctacaacgagcccccgc

SEQ ID NO: 15849 - DNA, 31 bp, Artificial Sequence
  Description of Artificial Sequence:  Nucleic Acid
  misc_feature: DNAzyme
gatttgggggctagctacaacgagtgccccc

SEQ ID NO: 15850 - DNA, 31 bp, Artificial Sequence
  Description of Artificial Sequence:  Nucleic Acid
  misc_feature: DNAzyme
cctggagaggctagctacaacgattgggcgt

SEQ ID NO: 15851 - DNA, 31 bp, Artificial Sequence
  Description of Artificial Sequence:  Nucleic Acid
  misc_feature: DNAzyme
gctcaatgggctagctacaacgactggagat

SEQ ID NO: 15852 - DNA, 31 bp, Artificial Sequence
  Description of Artificial Sequence:  Nucleic Acid
  misc_feature: DNAzyme
ccgctcaaggctagctacaacgagcctggag

SEQ ID NO: 15853 - DNA, 31 bp, Artificial Sequence
  Description of Artificial Sequence:  Nucleic Acid
  misc_feature: DNAzyme
tcaacccgggctagctacaacgatcaatgcc

SEQ ID NO: 15854 - DNA, 31 bp, Artificial Sequence
  Description of Artificial Sequence:  Nucleic Acid
  misc_feature: DNAzyme
tggatcaaggctagctacaacgaccgctcaa

SEQ ID NO: 15855 - DNA, 31 bp, Artificial Sequence
  Description of Artificial Sequence:  Nucleic Acid
  misc_feature: DNAzyme
ttcttggaggctagctacaacgacaacccgc

SEQ ID NO: 15856 - DNA, 31 bp, Artificial Sequence
  Description of Artificial Sequence:  Nucleic Acid
  misc_feature: DNAzyme
cgaccgggggctagctacaacgacctttctt

SEQ ID NO: 15857 - DNA, 31 bp, Artificial Sequence
  Description of Artificial Sequence:  Nucleic Acid
  misc_feature: DNAzyme
caggacgaggctagctacaacgacgggtcct

SEQ ID NO: 15858 - DNA, 31 bp, Artificial Sequence
  Description of Artificial Sequence:  Nucleic Acid
  misc_feature: DNAzyme
tgccaggaggctagctacaacgagaccgggt

SEQ ID NO: 15859 - DNA, 31 bp, Artificial Sequence
  Description of Artificial Sequence:  Nucleic Acid
  misc_feature: DNAzyme
cggaattgggctagctacaacgacaggacga

SEQ ID NO: 15860 - DNA, 31 bp, Artificial Sequence
  Description of Artificial Sequence:  Nucleic Acid
  misc_feature: DNAzyme
caccggaaggctagctacaacgatgccagga

SEQ ID NO: 15861 - DNA, 31 bp, Artificial Sequence
  Description of Artificial Sequence:  Nucleic Acid
  misc_feature: DNAzyme
tgagtacaggctagctacaacgacggaattg

SEQ ID NO: 15862 - DNA, 31 bp, Artificial Sequence
  Description of Artificial Sequence:  Nucleic Acid
  misc_feature: DNAzyme
ggtgagtaggctagctacaacgaaccggaat

SEQ ID NO: 15863 - DNA, 31 bp, Artificial Sequence
  Description of Artificial Sequence:  Nucleic Acid
  misc_feature: DNAzyme
ccggtgagggctagctacaacgaacaccgga

SEQ ID NO: 15864 - DNA, 31 bp, Artificial Sequence
  Description of Artificial Sequence:  Nucleic Acid
  misc_feature: DNAzyme
ggaaccggggctagctacaacgagagtacac

SEQ ID NO: 15865 - DNA, 31 bp, Artificial Sequence
  Description of Artificial Sequence:  Nucleic Acid
  misc_feature: DNAzyme
ctgcggaaggctagctacaacgacggtgagt

SEQ ID NO: 15866 - DNA, 31 bp, Artificial Sequence
  Description of Artificial Sequence:  Nucleic Acid
  misc_feature: DNAzyme
gtggtctgggctagctacaacgaggaaccgg

SEQ ID NO: 15867 - DNA, 31 bp, Artificial Sequence
  Description of Artificial Sequence:  Nucleic Acid
  misc_feature: DNAzyme
catagtggggctagctacaacgactgcggaa

SEQ ID NO: 15868 - DNA, 31 bp, Artificial Sequence
  Description of Artificial Sequence:  Nucleic Acid
  misc_feature: DNAzyme
agccatagggctagctacaacgaggtctgcg

SEQ ID NO: 15869 - DNA, 31 bp, Artificial Sequence
  Description of Artificial Sequence:  Nucleic Acid
  misc_feature: DNAzyme
gagagccaggctagctacaacgaagtggtct

SEQ ID NO: 15870 - DNA, 31 bp, Artificial Sequence
  Description of Artificial Sequence:  Nucleic Acid
  misc_feature: DNAzyme
cgggagagggctagctacaacgacatagtgg

SEQ ID NO: 15871 - DNA, 31 bp, Artificial Sequence
  Description of Artificial Sequence:  Nucleic Acid
  misc_feature: DNAzyme
ctccaggaggctagctacaacgacccccctc

SEQ ID NO: 15872 - DNA, 31 bp, Artificial Sequence
  Description of Artificial Sequence:  Nucleic Acid
  misc_feature: DNAzyme
tcgtgcagggctagctacaacgactccagga

SEQ ID NO: 15873 - DNA, 31 bp, Artificial Sequence
  Description of Artificial Sequence:  Nucleic Acid
  misc_feature: DNAzyme
gtgtcgtgggctagctacaacgaagcctcca

SEQ ID NO: 15874 - DNA, 31 bp, Artificial Sequence
  Description of Artificial Sequence:  Nucleic Acid
  misc_feature: DNAzyme
gagtgtcgggctagctacaacgagcagcctc

SEQ ID NO: 15875 - DNA, 31 bp, Artificial Sequence
  Description of Artificial Sequence:  Nucleic Acid
  misc_feature: DNAzyme
tatgagtgggctagctacaacgacgtgcagc

SEQ ID NO: 15876 - DNA, 31 bp, Artificial Sequence
  Description of Artificial Sequence:  Nucleic Acid
  misc_feature: DNAzyme
agtatgagggctagctacaacgagtcgtgca

SEQ ID NO: 15877 - DNA, 31 bp, Artificial Sequence
  Description of Artificial Sequence:  Nucleic Acid
  misc_feature: DNAzyme
cgttagtaggctagctacaacgagagtgtcg

SEQ ID NO: 15878 - DNA, 31 bp, Artificial Sequence
  Description of Artificial Sequence:  Nucleic Acid
  misc_feature: DNAzyme
ggcgttagggctagctacaacgaatgagtgt

SEQ ID NO: 15879 - DNA, 31 bp, Artificial Sequence
  Description of Artificial Sequence:  Nucleic Acid
  misc_feature: DNAzyme
ccatggcgggctagctacaacgatagtatga

SEQ ID NO: 15880 - DNA, 31 bp, Artificial Sequence
  Description of Artificial Sequence:  Nucleic Acid
  misc_feature: DNAzyme
agccatggggctagctacaacgagttagtat

SEQ ID NO: 15881 - DNA, 31 bp, Artificial Sequence
  Description of Artificial Sequence:  Nucleic Acid
  misc_feature: DNAzyme
tctagccaggctagctacaacgaggcgttag

SEQ ID NO: 15882 - DNA, 31 bp, Artificial Sequence
  Description of Artificial Sequence:  Nucleic Acid
  misc_feature: DNAzyme
gcgtctagggctagctacaacgacatggcgt

SEQ ID NO: 15883 - DNA, 31 bp, Artificial Sequence
  Description of Artificial Sequence:  Nucleic Acid
  misc_feature: DNAzyme
agaaagcgggctagctacaacgactagccat

SEQ ID NO: 15884 - DNA, 31 bp, Artificial Sequence
  Description of Artificial Sequence:  Nucleic Acid
  misc_feature: DNAzyme
gcagaaagggctagctacaacgagtctagcc

SEQ ID NO: 15885 - DNA, 31 bp, Artificial Sequence
  Description of Artificial Sequence:  Nucleic Acid
  misc_feature: DNAzyme
tcttcacgggctagctacaacgaagaaagcg

SEQ ID NO: 15886 - DNA, 31 bp, Artificial Sequence
  Description of Artificial Sequence:  Nucleic Acid
  misc_feature: DNAzyme
tgtcttcaggctagctacaacgagcagaaag

SEQ ID NO: 15887 - DNA, 31 bp, Artificial Sequence
  Description of Artificial Sequence:  Nucleic Acid
  misc_feature: DNAzyme
aactactgggctagctacaacgacttcacgc

SEQ ID NO: 15888 - DNA, 31 bp, Artificial Sequence
  Description of Artificial Sequence:  Nucleic Acid
  misc_feature: DNAzyme
aggaactaggctagctacaacgatgtcttca

SEQ ID NO: 15889 - DNA, 31 bp, Artificial Sequence
  Description of Artificial Sequence:  Nucleic Acid
  misc_feature: DNAzyme
gtgaggaaggctagctacaacgatactgtct

SEQ ID NO: 15890 - DNA, 31 bp, Artificial Sequence
  Description of Artificial Sequence:  Nucleic Acid
  misc_feature: DNAzyme
ctcccctgggctagctacaacgagaggaact

SEQ ID NO: 15891 - DNA, 31 bp, Artificial Sequence
  Description of Artificial Sequence:  Nucleic Acid
  misc_feature: DNAzyme
atagatcaggctagctacaacgatcccctgt

SEQ ID NO: 15892 - DNA, 31 bp, Artificial Sequence
  Description of Artificial Sequence:  Nucleic Acid
  misc_feature: DNAzyme
accatagaggctagctacaacgacactcccc

SEQ ID NO: 15893 - DNA, 31 bp, Artificial Sequence
  Description of Artificial Sequence:  Nucleic Acid
  misc_feature: DNAzyme
ctccaccaggctagctacaacgaagatcact

SEQ ID NO: 15894 - DNA, 31 bp, Artificial Sequence
  Description of Artificial Sequence:  Nucleic Acid
  misc_feature: DNAzyme
acactccaggctagctacaacgacatagatc

SEQ ID NO: 15895 - DNA, 31 bp, Artificial Sequence
  Description of Artificial Sequence:  Nucleic Acid
  misc_feature: DNAzyme
gggcgacaggctagctacaacgatccaccat

SEQ ID NO: 15896 - DNA, 31 bp, Artificial Sequence
  Description of Artificial Sequence:  Nucleic Acid
  misc_feature: DNAzyme
gggggcgaggctagctacaacgaactccacc

SEQ ID NO: 15897 - RNA, 33 nt, Artificial Sequence
  Description of Artificial Sequence:  Nucleic Acid
  misc_feature (1)..(4): phosphorothioate linkage
  misc_feature (8)..(8): 2'-deoxy-2'-C-allyl derivative
  misc_feature (28)..(32): 2'-O-Methyl
  misc_feature (25)..(26): 2'-O-Methyl
  misc_feature (13)..(23): 2'-O-Methyl
  misc_feature (11)..(11): 2'-O-Methyl
  misc_feature (33)..(33): n stands for inverted deoxyabasic derivative
  misc_feature (1)..(7): 2'-O-Methyl
ccaagacugaugaggcgaaagccgaaaggaccn

SEQ ID NO: 15898 - DNA, 20 bp, Artificial Sequence
  Description of Artificial Sequence:  Nucleic Acid
  misc_feature (1)..(19): phosphorothioate linkage
gtgctcatgatgcacggtct

SEQ ID NO: 15899 - RNA, 33 nt, Artificial Sequence
  Description of Artificial Sequence:  Nucleic Acid
  misc_feature (1)..(4): phosphorothioate linkage
  misc_feature (26)..(26): n is a 5-bromo-2'-deoxy uridine
  misc_feature (8)..(8): 2'-deoxy-2'-C-allyl derivative
  misc_feature (25)..(25): 2'-O-Methyl
  misc_feature (28)..(32): 2'-O-Methyl
  misc_feature (13)..(23): 2'-O-Methyl
  misc_feature (1)..(7): 2'-O-Methyl
  misc_feature (11)..(11): 2'-O-Methyl
  misc_feature (33)..(33): n stands for inverted deoxyabasic derivative
ccaagacugaugaggcguuagccganaggaccn

SEQ ID NO: 15900 - RNA, 33 nt, Artificial Sequence
  Description of Artificial Sequence:  Nucleic Acid
  misc_feature (1)..(4): phosphorothioate linkage
  misc_feature (31)..(31): n is a 5-bromo-2'-deoxy uridine
  misc_feature (8)..(8): 2'-deoxy-2'-C-allyl derivative
  misc_feature (11)..(11): 2'-O-Methyl
  misc_feature (25)..(25): 2'-O-Methyl
  misc_feature (32)..(32): 2'-O-Methyl
  misc_feature (28)..(30): 2'-O-Methyl
  misc_feature (13)..(23): 2'-O-Methyl
  misc_feature (1)..(7): 2'-O-Methyl
  misc_feature (33)..(33): n stands for inverted deoxyabasic derivative
ccaagacugaugaggcguuagccgaaaggancn

SEQ ID NO: 15901 - RNA, 33 nt, Artificial Sequence
  Description of Artificial Sequence:  Nucleic Acid
  misc_feature (1)..(4): phosphorothioate linkage
  misc_feature (1)..(1): n is a 5-bromo-2'-deoxy uridine
  misc_feature (8)..(8): 2'-deoxy-2'-C-allyl derivative
  misc_feature (2)..(7): 2'-O-Methyl
  misc_feature (13)..(23): 2'-O-Methyl
  misc_feature (28)..(32): 2'-O-Methyl
  misc_feature (25)..(26): 2'-O-Methyl
  misc_feature (11)..(11): 2'-O-Methyl
  misc_feature (33)..(33): n stands for inverted deoxyabasic derivative
ncaagacugaugaggcguuagccgaaaggaccn

SEQ ID NO: 15902 - RNA, 33 nt, Artificial Sequence; identical to SEQ ID NO: 15901
  Description of Artificial Sequence:  Nucleic Acid
  misc_feature (2)..(4): phosphorothioate linkage
  misc_feature (1)..(1): n is a 5-bromo-2'-deoxy uridine
  misc_feature (8)..(8): 2'-deoxy-2'-C-allyl derivative
  misc_feature (2)..(7): 2'-O-Methyl
  misc_feature (25)..(26): 2'-O-Methyl
  misc_feature (28)..(32): 2'-O-Methyl
  misc_feature (13)..(23): 2'-O-Methyl
  misc_feature (11)..(11): 2'-O-Methyl
  misc_feature (33)..(33): n stands for inverted deoxyabasic derivative

SEQ ID NO: 15903 - RNA, 33 nt, Artificial Sequence
  Description of Artificial Sequence:  Nucleic Acid
  misc_feature (2)..(4): phosphorothioate linkage
  misc_feature (8)..(8): 2'-deoxy-2'-C-allyl derivative
  misc_feature (1)..(7): 2'-O-Methyl
  misc_feature (25)..(26): 2'-O-Methyl
  misc_feature (28)..(32): 2'-O-Methyl
  misc_feature (13)..(23): 2'-O-Methyl
  misc_feature (11)..(11): 2'-O-Methyl
  misc_feature (33)..(33): n stands for inverted deoxyabasic derivative
ccaagacugaugaggcguuagccgaaaggaccn

SEQ ID NO: 15904 - RNA, 37 nt, Artificial Sequence
  Description of Artificial Sequence:  Nucleic Acid
  misc_feature (1)..(4): phosphorothioate linkage
  misc_feature (17)..(17): 2'-deoxy-2'-amino derivative
  misc_feature (28)..(28): 2'-deoxy-2'-amino derivative
  misc_feature (9)..(15): 2'-O-Methyl
  misc_feature (1)..(7): 2'-O-Methyl
  misc_feature (29)..(36): 2'-O-Methyl
  misc_feature (27)..(27): 2'-O-Methyl
  misc_feature (21)..(24): 2'-O-Methyl
  misc_feature (19)..(19): 2'-O-Methyl
  misc_feature (37)..(37): n stands for inverted deoxyabasic derivative
gccaugggccgaaaggcgagucaaggucuuagacgcn

SEQ ID NO: 15905 - RNA, 37 nt, Artificial Sequence
  Description of Artificial Sequence:  Nucleic Acid
  misc_feature (1)..(4): phosphorothioate linkage
  misc_feature (17)..(17): 2'-deoxy-2'-amino derivative
  misc_feature (28)..(28): 2'-deoxy-2'-amino derivative
  misc_feature (9)..(15): 2'-O-Methyl
  misc_feature (1)..(7): 2'-O-Methyl
  misc_feature (29)..(36): 2'-O-Methyl
  misc_feature (27)..(27): 2'-O-Methyl
  misc_feature (21)..(24): 2'-O-Methyl
  misc_feature (19)..(19): 2'-O-Methyl
  misc_feature (37)..(37): n stands for inverted deoxyabasic derivative
cacgacagccgaaaggcgagucaaggucuucauacun

SEQ ID NO: 15906 - RNA, 37 nt, Artificial Sequence
  Description of Artificial Sequence:  Nucleic Acid
  misc_feature (1)..(4): phosphorothioate linkage
  misc_feature (17)..(17): 2'-deoxy-2'-amino derivative
  misc_feature (28)..(28): 2'-deoxy-2'-amino derivative
  misc_feature (9)..(15): 2'-O-Methyl
  misc_feature (1)..(7): 2'-O-Methyl
  misc_feature (29)..(36): 2'-O-Methyl
  misc_feature (27)..(27): 2'-O-Methyl
  misc_feature (21)..(24): 2'-O-Methyl
  misc_feature (19)..(19): 2'-O-Methyl
  misc_feature (37)..(37): n stands for inverted deoxyabasic derivative
ugcacgagccgaaaggcgagucaaggucuacucauan

SEQ ID NO: 15907 - RNA, 37 nt, Artificial Sequence
  Description of Artificial Sequence:  Nucleic Acid
  misc_feature (1)..(4): phosphorothioate linkage
  misc_feature (17)..(17): 2'-deoxy-2'-amino derivative
  misc_feature (28)..(28): 2'-deoxy-2'-amino derivative
  misc_feature (9)..(15): 2'-O-Methyl
  misc_feature (1)..(7): 2'-O-Methyl
  misc_feature (29)..(36): 2'-O-Methyl
  misc_feature (27)..(27): 2'-O-Methyl
  misc_feature (21)..(24): 2'-O-Methyl
  misc_feature (19)..(19): 2'-O-Methyl
  misc_feature (37)..(37): n stands for inverted deoxyabasic derivative
ggcugcagccgaaaggcgagucaaggucugacacucn

SEQ ID NO: 15908 - RNA, 37 nt, Artificial Sequence
  Description of Artificial Sequence:  Nucleic Acid
  misc_feature (1)..(4): phosphorothioate linkage
  misc_feature (17)..(17): 2'-deoxy-2'-amino derivative
  misc_feature (28)..(28): 2'-deoxy-2'-amino derivative
  misc_feature (9)..(15): 2'-O-Methyl
  misc_feature (1)..(7): 2'-O-Methyl
  misc_feature (29)..(36): 2'-O-Methyl
  misc_feature (27)..(27): 2'-O-Methyl
  misc_feature (21)..(24): 2'-O-Methyl
  misc_feature (19)..(19): 2'-O-Methyl
  misc_feature (37)..(37): n stands for inverted deoxyabasic derivative
gaggcuggccgaaaggcgagucaaggucuacgacacn

SEQ ID NO: 15909 - RNA, 37 nt, Artificial Sequence
  Description of Artificial Sequence:  Nucleic Acid
  misc_feature (1)..(4): phosphorothioate linkage
  misc_feature (17)..(17): 2'-deoxy-2'-amino derivative
  misc_feature (28)..(28): 2'-deoxy-2'-amino derivative
  misc_feature (9)..(15): 2'-O-Methyl
  misc_feature (1)..(7): 2'-O-Methyl
  misc_feature (29)..(36): 2'-O-Methyl
  misc_feature (27)..(27): 2'-O-Methyl
  misc_feature (21)..(24): 2'-O-Methyl
  misc_feature (19)..(19): 2'-O-Methyl
  misc_feature (37)..(37): n stands for inverted deoxyabasic derivative
ccgcagagccgaaaggcgagucaaggucucacuaugn

SEQ ID NO: 15910 - RNA, 37 nt, Artificial Sequence
  Description of Artificial Sequence:  Nucleic Acid
  misc_feature (1)..(4): phosphorothioate linkage
  misc_feature (17)..(17): 2'-deoxy-2'-amino derivative
  misc_feature (28)..(28): 2'-deoxy-2'-amino derivative
  misc_feature (9)..(15): 2'-O-Methyl
  misc_feature (1)..(7): 2'-O-Methyl
  misc_feature (29)..(36): 2'-O-Methyl
  misc_feature (27)..(27): 2'-O-Methyl
  misc_feature (21)..(24): 2'-O-Methyl
  misc_feature (19)..(19): 2'-O-Methyl
  misc_feature (37)..(37): n stands for inverted deoxyabasic derivative
gaaaggagccgaaaggcgagucaaggucuccggucgn

SEQ ID NO: 15911 - RNA, 37 nt, Artificial Sequence
  Description of Artificial Sequence:  Nucleic Acid
  misc_feature (1)..(4): phosphorothioate linkage
  misc_feature (17)..(17): 2'-deoxy-2'-amino derivative
  misc_feature (28)..(28): 2'-deoxy-2'-amino derivative
  misc_feature (9)..(15): 2'-O-Methyl
  misc_feature (1)..(7): 2'-O-Methyl
  misc_feature (29)..(36): 2'-O-Methyl
  misc_feature (27)..(27): 2'-O-Methyl
  misc_feature (21)..(24): 2'-O-Methyl
  misc_feature (19)..(19): 2'-O-Methyl
  misc_feature (37)..(37): n stands for inverted deoxyabasic derivative
cuccagggccgaaaggcgagucaaggucuauugagcn

SEQ ID NO: 15912 - RNA, 37 nt, Artificial Sequence
  Description of Artificial Sequence:  Nucleic Acid
  misc_feature (1)..(4): phosphorothioate linkage
  misc_feature (17)..(17): 2'-deoxy-2'-amino derivative
  misc_feature (28)..(28): 2'-deoxy-2'-amino derivative
  misc_feature (9)..(15): 2'-O-Methyl
  misc_feature (1)..(7): 2'-O-Methyl
  misc_feature (29)..(36): 2'-O-Methyl
  misc_feature (27)..(27): 2'-O-Methyl
  misc_feature (21)..(24): 2'-O-Methyl
  misc_feature (19)..(19): 2'-O-Methyl
  misc_feature (37)..(37): n stands for inverted deoxyabasic derivative
gggcacggccgaaaggcgagucaaggucuccaaaucn

SEQ ID NO: 15913 - RNA, 37 nt, Artificial Sequence
  Description of Artificial Sequence:  Nucleic Acid
  misc_feature (1)..(4): phosphorothioate linkage
  misc_feature (17)..(17): 2'-deoxy-2'-amino derivative
  misc_feature (28)..(28): 2'-deoxy-2'-amino derivative
  misc_feature (9)..(15): 2'-O-Methyl
  misc_feature (1)..(7): 2'-O-Methyl
  misc_feature (29)..(36): 2'-O-Methyl
  misc_feature (27)..(27): 2'-O-Methyl
  misc_feature (21)..(24): 2'-O-Methyl
  misc_feature (19)..(19): 2'-O-Methyl
  misc_feature (37)..(37): n stands for inverted deoxyabasic derivative
aacacuagccgaaaggcgagucaaggucuucggcuan

SEQ ID NO: 15914 - RNA, 37 nt, Artificial Sequence
  Description of Artificial Sequence:  Nucleic Acid
  misc_feature (1)..(4): phosphorothioate linkage
  misc_feature (17)..(17): 2'-deoxy-2'-amino derivative
  misc_feature (28)..(28): 2'-deoxy-2'-amino derivative
  misc_feature (9)..(15): 2'-O-Methyl
  misc_feature (1)..(7): 2'-O-Methyl
  misc_feature (29)..(36): 2'-O-Methyl
  misc_feature (27)..(27): 2'-O-Methyl
  misc_feature (21)..(24): 2'-O-Methyl
  misc_feature (19)..(19): 2'-O-Methyl
  misc_feature (37)..(37): n stands for inverted deoxyabasic derivative
gcacucggccgaaaggcgagucaaggucuaagcaccn

SEQ ID NO: 15915 - RNA, 35 nt, Artificial Sequence
  Description of Artificial Sequence:  Nucleic Acid
  misc_feature (1)..(4): phosphorothioate linkage
  misc_feature (16)..(16): 2'-deoxy-2'-amino derivative
  misc_feature (27)..(27): 2'-deoxy-2'-amino derivative
  misc_feature (8)..(14): 2'-O-Methyl
  misc_feature (1)..(6): 2'-O-Methyl
  misc_feature (18)..(18): 2'-O-Methyl
  misc_feature (20)..(23): 2'-O-Methyl
  misc_feature (26)..(26): 2'-O-Methyl
  misc_feature (28)..(34): 2'-O-Methyl
  misc_feature (35)..(35): n stands for inverted deoxyabasic derivative
gcuagagccgaaaggcgagucaaggucugcuuucn

SEQ ID NO: 15916 - RNA, 37 nt, Artificial Sequence
  Description of Artificial Sequence:  Nucleic Acid
  misc_feature (1)..(4): phosphorothioate linkage
  misc_feature (17)..(17): 2'-deoxy-2'-amino derivative
  misc_feature (28)..(28): 2'-deoxy-2'-amino derivative
  misc_feature (1)..(7): 2'-O-Methyl
  misc_feature (9)..(15): 2'-O-Methyl
  misc_feature (19)..(19): 2'-O-Methyl
  misc_feature (21)..(24): 2'-O-Methyl
  misc_feature (27)..(27): 2'-O-Methyl
  misc_feature (29)..(36): 2'-O-Methyl
  misc_feature (37)..(37): n stands for inverted deoxyabasic derivative
ggcuagagccgaaaggcgagucaaggucugcuuucun

SEQ ID NO: 15917 - RNA, 37 nt, Artificial Sequence
  Description of Artificial Sequence:  Nucleic Acid
  misc_feature (1)..(4): phosphorothioate linkage
  misc_feature (17)..(17): 2'-deoxy-2'-amino derivative
  misc_feature (28)..(28): 2'-deoxy-2'-amino derivative
  misc_feature (1)..(7): 2'-O-Methyl
  misc_feature (19)..(19): 2'-O-Methyl
  misc_feature (21)..(24): 2'-O-Methyl
  misc_feature (29)..(36): 2'-O-Methyl
  misc_feature (27)..(27): 2'-O-Methyl
  misc_feature (9)..(15): 2'-O-Methyl
  misc_feature (37)..(37): n stands for inverted deoxyabasic derivative
acuaacggccgaaaggcgagucaaggucucauggcun

SEQ ID NO: 15918 - RNA, 37 nt, Artificial Sequence
  Description of Artificial Sequence:  Nucleic Acid
  misc_feature (1)..(4): phosphorothioate linkage
  misc_feature (17)..(17): 2'-deoxy-2'-amino derivative
  misc_feature (28)..(28): 2'-deoxy-2'-amino derivative
  misc_feature (21)..(24): phosphorothioate linkage
  misc_feature (1)..(7): 2'-O-Methyl
  misc_feature (29)..(36): 2'-O-Methyl
  misc_feature (27)..(27): 2'-O-Methyl
  misc_feature (19)..(19): 2'-O-Methyl
  misc_feature (9)..(15): 2'-O-Methyl
  misc_feature (37)..(37): n stands for inverted deoxyabasic derivative
acucauagccgaaaggcgagucaaggucuuaacgccn

SEQ ID NO: 15919 - RNA, 35 nt, Artificial Sequence
  Description of Artificial Sequence:  Nucleic Acid
  misc_feature (1)..(4): phosphorothioate linkage
  misc_feature (16)..(16): 2'-deoxy-2'-amino derivative
  misc_feature (27)..(27): 2'-deoxy-2'-amino derivative
  misc_feature (1)..(6): 2'-O-Methyl
  misc_feature (8)..(14): 2'-O-Methyl
  misc_feature (18)..(18): 2'-O-Methyl
  misc_feature (20)..(23): 2'-O-Methyl
  misc_feature (26)..(26): 2'-O-Methyl
  misc_feature (28)..(34): 2'-O-Methyl
  misc_feature (35)..(35): n stands for inverted deoxyabasic derivative
gcacgagccgaaaggcgagucaaggucuacucaun

SEQ ID NO: 15920 - RNA, 35 nt, Artificial Sequence
  Description of Artificial Sequence:  Nucleic Acid
  misc_feature (1)..(4): phosphorothioate linkage
  misc_feature (16)..(16): 2'-deoxy-2'-amino derivative
  misc_feature (27)..(27): 2'-deoxy-2'-amino derivative
  misc_feature (1)..(6): 2'-O-Methyl
  misc_feature (8)..(14): 2'-O-Methyl
  misc_feature (18)..(18): 2'-O-Methyl
  misc_feature (20)..(23): 2'-O-Methyl
  misc_feature (26)..(26): 2'-O-Methyl
  misc_feature (28)..(34): 2'-O-Methyl
  misc_feature (35)..(35): n stands for inverted deoxyabasic derivative
gcugcagccgaaaggcgagucaaggucugacacun

SEQ ID NO: 15921 - RNA, 37 nt, Artificial Sequence
  Description of Artificial Sequence:  Nucleic Acid
  misc_feature (1)..(4): phosphorothioate linkage
  misc_feature (17)..(17): 2'-deoxy-2'-amino derivative
  misc_feature (28)..(28): 2'-deoxy-2'-amino derivative
  misc_feature (1)..(7): 2'-O-Methyl
  misc_feature (9)..(15): 2'-O-Methyl
  misc_feature (19)..(19): 2'-O-Methyl
  misc_feature (21)..(24): 2'-O-Methyl
  misc_feature (27)..(27): 2'-O-Methyl
  misc_feature (29)..(36): 2'-O-Methyl
  misc_feature (37)..(37): n stands for inverted deoxyabasic derivative
cuggagggccgaaaggcgagucaaggucuugcacgan

SEQ ID NO: 15922 - RNA, 35 nt, Artificial Sequence
  Description of Artificial Sequence:  Nucleic Acid
  misc_feature (1)..(4): phosphorothioate linkage
  misc_feature (16)..(16): 2'-deoxy-2'-amino derivative
  misc_feature (27)..(27): 2'-deoxy-2'-amino derivative
  misc_feature (1)..(6): 2'-O-Methyl
  misc_feature (8)..(14): 2'-O-Methyl
  misc_feature (18)..(18): 2'-O-Methyl
  misc_feature (20)..(23): 2'-O-Methyl
  misc_feature (26)..(26): 2'-O-Methyl
  misc_feature (28)..(34): 2'-O-Methyl
  misc_feature (35)..(35): n stands for inverted deoxyabasic derivative
cuaugggccgaaaggcgagucaaggucuucucccn

SEQ ID NO: 15923 - RNA, 37 nt, Artificial Sequence
  Description of Artificial Sequence:  Nucleic Acid
  misc_feature (1)..(4): phosphorothioate linkage
  misc_feature (17)..(17): 2'-deoxy-2'-amino derivative
  misc_feature (28)..(28): 2'-deoxy-2'-amino derivative
  misc_feature (1)..(7): 2'-O-Methyl
  misc_feature (9)..(15): 2'-O-Methyl
  misc_feature (19)..(19): 2'-O-Methyl
  misc_feature (21)..(24): 2'-O-Methyl
  misc_feature (27)..(27): 2'-O-Methyl
  misc_feature (29)..(36): 2'-O-Methyl
  misc_feature (37)..(37): n stands for inverted deoxyabasic derivative
acuaugggccgaaaggcgagucaaggucuucucccgn

SEQ ID NO: 15924 - RNA, 35 nt, Artificial Sequence
  Description of Artificial Sequence:  Nucleic Acid
  misc_feature (1)..(4): phosphorothioate linkage
  misc_feature (16)..(16): 2'-deoxy-2'-amino derivative
  misc_feature (27)..(27): 2'-deoxy-2'-amino derivative
  misc_feature (1)..(6): 2'-O-Methyl
  misc_feature (8)..(14): 2'-O-Methyl
  misc_feature (18)..(18): 2'-O-Methyl
  misc_feature (20)..(23): 2'-O-Methyl
  misc_feature (26)..(26): 2'-O-Methyl
  misc_feature (28)..(34): 2'-O-Methyl
  misc_feature (35)..(35): n stands for inverted deoxyabasic derivative
cgcagagccgaaaggcgagucaaggucucacuaun

SEQ ID NO: 15925 - RNA, 37 nt, Artificial Sequence
  Description of Artificial Sequence:  Nucleic Acid
  misc_feature (1)..(4): phosphorothioate linkage
  misc_feature (17)..(17): 2'-deoxy-2'-amino derivative
  misc_feature (28)..(28): 2'-deoxy-2'-amino derivative
  misc_feature (1)..(7): 2'-O-Methyl
  misc_feature (9)..(15): 2'-O-Methyl
  misc_feature (19)..(19): 2'-O-Methyl
  misc_feature (21)..(24): 2'-O-Methyl
  misc_feature (27)..(27): 2'-O-Methyl
  misc_feature (29)..(36): 2'-O-Methyl
  misc_feature (37)..(37): n stands for inverted deoxyabasic derivative
gguuccggccgaaaggcgagucaaggucuagaccacn

SEQ ID NO: 15926 - RNA, 37 nt, Artificial Sequence
  Description of Artificial Sequence:  Nucleic Acid
  misc_feature (1)..(4): phosphorothioate linkage
  misc_feature (17)..(17): 2'-deoxy-2'-amino derivative
  misc_feature (28)..(28): 2'-deoxy-2'-amino derivative
  misc_feature (1)..(7): 2'-O-Methyl
  misc_feature (9)..(15): 2'-O-Methyl
  misc_feature (19)..(19): 2'-O-Methyl
  misc_feature (21)..(24): 2'-O-Methyl
  misc_feature (27)..(27): 2'-O-Methyl
  misc_feature (29)..(36): 2'-O-Methyl
  misc_feature (37)..(37): n stands for inverted deoxyabasic derivative
guccugggccgaaaggcgagucaaggucuaauuccgn

SEQ ID NO: 15927 - RNA, 35 nt, Artificial Sequence
  Description of Artificial Sequence:  Nucleic Acid
  misc_feature (1)..(4): phosphorothioate linkage
  misc_feature (16)..(16): 2'-deoxy-2'-amino derivative
  misc_feature (27)..(27): 2'-deoxy-2'-amino derivative
  misc_feature (1)..(6): 2'-O-Methyl
  misc_feature (8)..(14): 2'-O-Methyl
  misc_feature (18)..(18): 2'-O-Methyl
  misc_feature (20)..(23): 2'-O-Methyl
  misc_feature (26)..(26): 2'-O-Methyl
  misc_feature (28)..(34): 2'-O-Methyl
  misc_feature (35)..(35): n stands for inverted deoxyabasic derivative
aaaggagccgaaaggcgagucaaggucuccggucn

SEQ ID NO: 15928 - RNA, 35 nt, Artificial Sequence
  Description of Artificial Sequence:  Nucleic Acid
  misc_feature (1)..(4): phosphorothioate linkage
  misc_feature (16)..(16): 2'-deoxy-2'-amino derivative
  misc_feature (27)..(27): 2'-deoxy-2'-amino derivative
  misc_feature (1)..(6): 2'-O-Methyl
  misc_feature (8)..(14): 2'-O-Methyl
  misc_feature (18)..(18): 2'-O-Methyl
  misc_feature (20)..(23): 2'-O-Methyl
  misc_feature (26)..(26): 2'-O-Methyl
  misc_feature (28)..(34): 2'-O-Methyl
  misc_feature (35)..(35): n stands for inverted deoxyabasic derivative
acucgggccgaaaggcgagucaaggucuuagcagn

SEQ ID NO: 15929 - RNA, 37 nt, Artificial Sequence
  Description of Artificial Sequence:  Nucleic Acid
  misc_feature (1)..(4): phosphorothioate linkage
  misc_feature (17)..(17): 2'-deoxy-2'-amino derivative
  misc_feature (28)..(28): 2'-deoxy-2'-amino derivative
  misc_feature (1)..(7): 2'-O-Methyl
  misc_feature (9)..(15): 2'-O-Methyl
  misc_feature (19)..(19): 2'-O-Methyl
  misc_feature (21)..(24): 2'-O-Methyl
  misc_feature (27)..(27): 2'-O-Methyl
  misc_feature (29)..(36): 2'-O-Methyl
  misc_feature (37)..(37): n stands for inverted deoxyabasic derivative
uacucgggccgaaaggcgagucaaggucuuagcagun

SEQ ID NO: 15930 - RNA, 35 nt, Artificial Sequence
  Description of Artificial Sequence:  Nucleic Acid
  misc_feature (1)..(4): phosphorothioate linkage
  misc_feature (16)..(16): 2'-deoxy-2'-amino derivative
  misc_feature (27)..(27): 2'-deoxy-2'-amino derivative
  misc_feature (1)..(6): 2'-O-Methyl
  misc_feature (8)..(14): 2'-O-Methyl
  misc_feature (20)..(23): 2'-O-Methyl
  misc_feature (26)..(26): 2'-O-Methyl
  misc_feature (28)..(34): 2'-O-Methyl
  misc_feature (35)..(35): n stands for inverted deoxyabasic derivative
acacuagccgaaaggcgagucaaggucuucggcun

SEQ ID NO: 15931 - RNA, 37 nt, Artificial Sequence
  Description of Artificial Sequence:  Nucleic Acid
  misc_feature (1)..(4): phosphorothioate linkage
  misc_feature (17)..(17): 2'-deoxy-2'-amino derivative
  misc_feature (28)..(28): 2'-deoxy-2'-amino derivative
  misc_feature (1)..(7): 2'-O-Methyl
  misc_feature (9)..(15): 2'-O-Methyl
  misc_feature (19)..(19): 2'-O-Methyl
  misc_feature (21)..(24): 2'-O-Methyl
  misc_feature (27)..(27): 2'-O-Methyl
  misc_feature (29)..(36): 2'-O-Methyl
  misc_feature (37)..(37): n stands for inverted deoxyabasic derivative
gacccaagccgaaaggcgagucaaggucuacuacucn

SEQ ID NO: 15932 - RNA, 35 nt, Artificial Sequence
  Description of Artificial Sequence:  Nucleic Acid
  misc_feature (1)..(4): phosphorothioate linkage
  misc_feature (16)..(16): 2'-deoxy-2'-amino derivative
  misc_feature (27)..(27): 2'-deoxy-2'-amino derivative
  misc_feature (1)..(6): 2'-O-Methyl
  misc_feature (8)..(14): 2'-O-Methyl
  misc_feature (18)..(18): 2'-O-Methyl
  misc_feature (20)..(23): 2'-O-Methyl
  misc_feature (26)..(26): 2'-O-Methyl
  misc_feature (28)..(34): 2'-O-Methyl
  misc_feature (35)..(35): n stands for inverted deoxyabasic derivative
ucgcgagccgaaaggcgagucaaggucuccaacan

SEQ ID NO: 15933 - RNA, 37 nt, Artificial Sequence
  Description of Artificial Sequence:  Nucleic Acid
  misc_feature (1)..(4): phosphorothioate linkage
  misc_feature (17)..(17): 2'-deoxy-2'-amino derivative
  misc_feature (28)..(28): 2'-deoxy-2'-amino derivative
  misc_feature (1)..(7): 2'-O-Methyl
  misc_feature (9)..(15): 2'-O-Methyl
  misc_feature (19)..(19): 2'-O-Methyl
  misc_feature (21)..(24): 2'-O-Methyl
  misc_feature (27)..(27): 2'-O-Methyl
  misc_feature (29)..(36): 2'-O-Methyl
  misc_feature (37)..(37): n stands for inverted deoxyabasic derivative
uucgcgagccgaaaggcgagucaaggucuccaacacn

SEQ ID NO: 15934 - RNA, 37 nt, Artificial Sequence
  Description of Artificial Sequence:  Nucleic Acid
  misc_feature (1)..(4): phosphorothioate linkage
  misc_feature (17)..(17): 2'-deoxy-2'-amino derivative
  misc_feature (28)..(28): 2'-deoxy-2'-amino derivative
  misc_feature (1)..(7): 2'-O-Methyl
  misc_feature (9)..(15): 2'-O-Methyl
  misc_feature (27)..(27): 2'-O-Methyl
  misc_feature (29)..(36): 2'-O-Methyl
  misc_feature (19)..(19): 2'-O-Methyl
  misc_feature (21)..(24): 2'-O-Methyl
  misc_feature (37)..(37): n stands for inverted deoxyabasic derivative
ccuuucggccgaaaggcgagucaaggucugacccaan

SEQ ID NO: 15935 - RNA, 37 nt, Artificial Sequence
  Description of Artificial Sequence:  Nucleic Acid
  misc_feature (1)..(4): phosphorothioate linkage
  misc_feature (17)..(17): 2'-deoxy-2'-amino derivative
  misc_feature (28)..(28): 2'-deoxy-2'-amino derivative
  misc_feature (1)..(7): 2'-O-Methyl
  misc_feature (27)..(27): 2'-O-Methyl
  misc_feature (29)..(36): 2'-O-Methyl
  misc_feature (9)..(15): 2'-O-Methyl
  misc_feature (21)..(24): 2'-O-Methyl
  misc_feature (19)..(19): 2'-O-Methyl
  misc_feature (37)..(37): n stands for inverted deoxyabasic derivative
aguaccagccgaaaggcgagucaaggucuaaggccun

SEQ ID NO: 15936 - RNA, 37 nt, Artificial Sequence
  Description of Artificial Sequence:  Nucleic Acid
  misc_feature (1)..(4): phosphorothioate linkage
  misc_feature (17)..(17): 2'-deoxy-2'-amino derivative
  misc_feature (28)..(28): 2'-deoxy-2'-amino derivative
  misc_feature (19)..(19): 2'-O-Methyl
  misc_feature (27)..(27): 2'-O-Methyl
  misc_feature (29)..(36): 2'-O-Methyl
  misc_feature (9)..(15): 2'-O-Methyl
  misc_feature (21)..(24): 2'-O-Methyl
  misc_feature (1)..(7): 2'-O-Methyl
  misc_feature (37)..(37): n stands for inverted deoxyabasic derivative
ggcaguagccgaaaggcgagucaaggucucacaaggn

SEQ ID NO: 15937 - RNA, 37 nt, Artificial Sequence
  Description of Artificial Sequence:  Nucleic Acid
  misc_feature (1)..(4): phosphorothioate linkage
  misc_feature (17)..(17): 2'-deoxy-2'-amino derivative
  misc_feature (28)..(28): 2'-deoxy-2'-amino derivative
  misc_feature (9)..(15): 2'-O-Methyl
  misc_feature (27)..(27): 2'-O-Methyl
  misc_feature (21)..(24): 2'-O-Methyl
  misc_feature (29)..(36): 2'-O-Methyl
  misc_feature (19)..(19): 2'-O-Methyl
  misc_feature (1)..(7): 2'-O-Methyl
  misc_feature (37)..(37): n stands for inverted deoxyabasic derivative
uaucagggccgaaaggcgagucaaggucuaguaccan

SEQ ID NO: 15938 - RNA, 37 nt, Artificial Sequence
  Description of Artificial Sequence:  Nucleic Acid
  misc_feature (1)..(4): phosphorothioate linkage
  misc_feature (17)..(17): 2'-deoxy-2'-amino derivative
  misc_feature (28)..(28): 2'-deoxy-2'-amino derivative
  misc_feature (9)..(15): 2'-O-Methyl
  misc_feature (1)..(7): 2'-O-Methyl
  misc_feature (29)..(36): 2'-O-Methyl
  misc_feature (27)..(27): 2'-O-Methyl
  misc_feature (21)..(24): 2'-O-Methyl
  misc_feature (19)..(19): 2'-O-Methyl
  misc_feature (37)..(37): n stands for inverted deoxyabasic derivative
gcaagcagccgaaaggcgagucaaggucuccuaucan

SEQ ID NO: 15939 - RNA, 37 nt, Artificial Sequence
  Description of Artificial Sequence:  Nucleic Acid
  misc_feature (1)..(4): phosphorothioate linkage
  misc_feature (17)..(17): 2'-deoxy-2'-amino derivative
  misc_feature (28)..(28): 2'-deoxy-2'-amino derivative
  misc_feature (29)..(36): phosphorothioate linkage
  misc_feature (1)..(7): 2'-O-Methyl
  misc_feature (9)..(15): 2'-O-Methyl
  misc_feature (21)..(24): 2'-O-Methyl
  misc_feature (27)..(27): 2'-O-Methyl
  misc_feature (19)..(19): 2'-O-Methyl
  misc_feature (37)..(37): n stands for inverted deoxyabasic derivative
ucgcaaggccgaaaggcgagucaaggucuacccuaun

SEQ ID NO: 15940 - RNA, 35 nt, Artificial Sequence
  Description of Artificial Sequence:  Nucleic Acid
  misc_feature (1)..(4): phosphorothioate linkage
  misc_feature (16)..(16): 2'-deoxy-2'-amino derivative
  misc_feature (27)..(27): 2'-deoxy-2'-amino derivative
  misc_feature (1)..(6): 2'-O-Methyl
  misc_feature (8)..(14): 2'-O-Methyl
  misc_feature (18)..(18): 2'-O-Methyl
  misc_feature (20)..(23): 2'-O-Methyl
  misc_feature (26)..(26): 2'-O-Methyl
  misc_feature (28)..(34): 2'-O-Methyl
  misc_feature (35)..(35): n stands for inverted deoxyabasic derivative
ugaagagccgaaaggcgagucaaggucuaguagun

SEQ ID NO: 15941 - RNA, 37 nt, Artificial Sequence
  Description of Artificial Sequence:  Nucleic Acid
  misc_feature (1)..(4): phosphorothioate linkage
  misc_feature (17)..(17): 2'-deoxy-2'-amino derivative
  misc_feature (28)..(28): 2'-deoxy-2'-amino derivative
  misc_feature (1)..(7): 2'-O-Methyl
  misc_feature (9)..(15): 2'-O-Methyl
  misc_feature (19)..(19): 2'-O-Methyl
  misc_feature (21)..(24): 2'-O-Methyl
  misc_feature (27)..(27): 2'-O-Methyl
  misc_feature (29)..(36): 2'-O-Methyl
  misc_feature (37)..(37): n stands for inverted deoxyabasic derivative
gugaagagccgaaaggcgagucaaggucuaguaguun

SEQ ID NO: 15942 - RNA, 37 nt, Artificial Sequence
  Description of Artificial Sequence:  Nucleic Acid
  misc_feature (1)..(4): phosphorothioate linkage
  misc_feature (17)..(17): 2'-deoxy-2'-amino derivative
  misc_feature (28)..(28): 2'-deoxy-2'-amino derivative
  misc_feature (1)..(7): 2'-O-Methyl
  misc_feature (9)..(15): 2'-O-Methyl
  misc_feature (19)..(19): 2'-O-Methyl
  misc_feature (21)..(24): 2'-O-Methyl
  misc_feature (27)..(27): 2'-O-Methyl
  misc_feature (29)..(36): 2'-O-Methyl
  misc_feature (37)..(37): n stands for inverted deoxyabasic derivative
cuuucuggccgaaaggcgagucaaggucugugaagan

SEQ ID NO: 15943 - RNA, 35 nt, Artificial Sequence
  Description of Artificial Sequence:  Nucleic Acid
  misc_feature (1)..(4): phosphorothioate linkage
  misc_feature (16)..(16): 2'-deoxy-2'-amino derivative
  misc_feature (27)..(27): 2'-deoxy-2'-amino derivative
  misc_feature (1)..(6): 2'-O-Methyl
  misc_feature (8)..(14): 2'-O-Methyl
  misc_feature (18)..(18): 2'-O-Methyl
  misc_feature (20)..(23): 2'-O-Methyl
  misc_feature (26)..(26): 2'-O-Methyl
  misc_feature (28)..(34): 2'-O-Methyl
  misc_feature (35)..(35): n stands for inverted deoxyabasic derivative
uagacggccgaaaggcgagucaaggucuuuucugn

SEQ ID NO: 15944 - RNA, 35 nt, Artificial Sequence
  Description of Artificial Sequence:  Nucleic Acid
  misc_feature (1)..(4): phosphorothioate linkage
  misc_feature (16)..(16): 2'-deoxy-2'-amino derivative
  misc_feature (27)..(27): 2'-deoxy-2'-amino derivative
  misc_feature (1)..(6): 2'-O-Methyl
  misc_feature (28)..(34): 2'-O-Methyl
  misc_feature (18)..(18): 2'-O-Methyl
  misc_feature (20)..(23): 2'-O-Methyl
  misc_feature (26)..(26): 2'-O-Methyl
  misc_feature (8)..(14): 2'-O-Methyl
  misc_feature (35)..(35): n stands for inverted deoxyabasic derivative
ccaugggccgaaaggcgagucaaggucuuagacgn

SEQ ID NO: 15945 - RNA, 35 nt, Artificial Sequence
  Description of Artificial Sequence:  Nucleic Acid
  misc_feature (1)..(4): phosphorothioate linkage
  misc_feature (16)..(16): 2'-deoxy-2'-amino derivative
  misc_feature (27)..(27): 2'-deoxy-2'-amino derivative
  misc_feature (1)..(6): 2'-O-Methyl
  misc_feature (28)..(34): 2'-O-Methyl
  misc_feature (18)..(18): 2'-O-Methyl
  misc_feature (20)..(23): 2'-O-Methyl
  misc_feature (26)..(26): 2'-O-Methyl
  misc_feature (8)..(14): 2'-O-Methyl
  misc_feature (35)..(35): n stands for inverted deoxyabasic derivative
cuaacggccgaaaggcgagucaaggucucauggcn

SEQ ID NO: 15946 - RNA, 35 nt, Artificial Sequence
  Description of Artificial Sequence:  Nucleic Acid
  misc_feature (1)..(4): phosphorothioate linkage
  misc_feature (16)..(16): 2'-deoxy-2'-amino derivative
  misc_feature (27)..(27): 2'-deoxy-2'-amino derivative
  misc_feature (26)..(26): 2'-O-Methyl
  misc_feature (28)..(34): 2'-O-Methyl
  misc_feature (20)..(23): phosphorothioate linkage
  misc_feature (1)..(6): 2'-O-Methyl
  misc_feature (18)..(18): 2'-O-Methyl
  misc_feature (8)..(14): 2'-O-Methyl
  misc_feature (35)..(35): n stands for inverted deoxyabasic derivative
uacuaagccgaaaggcgagucaaggucugccaugn

SEQ ID NO: 15947 - RNA, 37 nt, Artificial Sequence
  Description of Artificial Sequence:  Nucleic Acid
  misc_feature (1)..(4): phosphorothioate linkage
  misc_feature (17)..(17): 2'-deoxy-2'-amino derivative
  misc_feature (28)..(28): 2'-deoxy-2'-amino derivative
  misc_feature (1)..(7): 2'-O-Methyl
  misc_feature (9)..(15): 2'-O-Methyl
  misc_feature (19)..(19): 2'-O-Methyl
  misc_feature (21)..(24): 2'-O-Methyl
  misc_feature (27)..(27): 2'-O-Methyl
  misc_feature (29)..(36): 2'-O-Methyl
  misc_feature (37)..(37): n stands for inverted deoxyabasic derivative
auacuaagccgaaaggcgagucaaggucugccauggn

SEQ ID NO: 15948 - RNA, 35 nt, Artificial Sequence
  Description of Artificial Sequence:  Nucleic Acid
  misc_feature (1)..(4): phosphorothioate linkage
  misc_feature (16)..(16): 2'-deoxy-2'-amino derivative
  misc_feature (27)..(27): 2'-deoxy-2'-amino derivative
  misc_feature (1)..(6): 2'-O-Methyl
  misc_feature (8)..(14): 2'-O-Methyl
  misc_feature (18)..(18): 2'-O-Methyl
  misc_feature (20)..(23): 2'-O-Methyl
  misc_feature (26)..(26): 2'-O-Methyl
  misc_feature (28)..(34): 2'-O-Methyl
  misc_feature (35)..(35): n stands for inverted deoxyabasic derivative
acgacagccgaaaggcgagucaaggucuucauacn

SEQ ID NO: 15949 - RNA, 35 nt, Artificial Sequence
  Description of Artificial Sequence:  Nucleic Acid
  misc_feature (1)..(4): phosphorothioate linkage
  misc_feature (16)..(16): 2'-deoxy-2'-amino derivative
  misc_feature (27)..(27): 2'-deoxy-2'-amino derivative
  misc_feature (1)..(6): 2'-O-Methyl
  misc_feature (8)..(14): 2'-O-Methyl
  misc_feature (18)..(18): 2'-O-Methyl
  misc_feature (20)..(23): 2'-O-Methyl
  misc_feature (26)..(26): 2'-O-Methyl
  misc_feature (28)..(34): 2'-O-Methyl
  misc_feature (35)..(35): n stands for inverted deoxyabasic derivative
aggcuggccgaaaggcgagucaaggucuacgacan

SEQ ID NO: 15950 - RNA, 35 nt, Artificial Sequence
  Description of Artificial Sequence:  Nucleic Acid
  misc_feature (1)..(4): phosphorothioate linkage
  misc_feature (16)..(16): 2'-deoxy-2'-amino derivative
  misc_feature (27)..(27): 2'-deoxy-2'-amino derivative
  misc_feature (1)..(6): 2'-O-Methyl
  misc_feature (8)..(14): 2'-O-Methyl
  misc_feature (18)..(18): 2'-O-Methyl
  misc_feature (20)..(23): 2'-O-Methyl
  misc_feature (26)..(26): 2'-O-Methyl
  misc_feature (28)..(34): 2'-O-Methyl
  misc_feature (35)..(35): n stands for inverted deoxyabasic derivative
uggagggccgaaaggcgagucaaggucuugcacgn

SEQ ID NO: 15951 - RNA, 35 nt, Artificial Sequence
  Description of Artificial Sequence:  Nucleic Acid
  misc_feature (1)..(4): phosphorothioate linkage
  misc_feature (16)..(16): 2'-deoxy-2'-amino derivative
  misc_feature (27)..(27): 2'-deoxy-2'-amino derivative
  misc_feature (1)..(6): 2'-O-Methyl
  misc_feature (8)..(14): 2'-O-Methyl
  misc_feature (18)..(18): 2'-O-Methyl
  misc_feature (20)..(23): 2'-O-Methyl
  misc_feature (26)..(26): 2'-O-Methyl
  misc_feature (28)..(34): 2'-O-Methyl
  misc_feature (35)..(35): n stands for inverted deoxyabasic derivative
guuccggccgaaaggcgagucaaggucuagaccan

SEQ ID NO: 15952 - RNA, 37 nt, Artificial Sequence
  Description of Artificial Sequence:  Nucleic Acid
  misc_feature (1)..(4): phosphorothioate linkage
  misc_feature (17)..(17): 2'-deoxy-2'-amino derivative
  misc_feature (28)..(28): 2'-deoxy-2'-amino derivative
  misc_feature (1)..(7): 2'-O-Methyl
  misc_feature (9)..(15): 2'-O-Methyl
  misc_feature (19)..(19): 2'-O-Methyl
  misc_feature (21)..(24): 2'-O-Methyl
  misc_feature (27)..(27): 2'-O-Methyl
  misc_feature (29)..(36): 2'-O-Methyl
  misc_feature (37)..(37): n stands for inverted deoxyabasic derivative
guacucagccgaaaggcgagucaaggucucgguuccn

SEQ ID NO: 15953 - RNA, 35 nt, Artificial Sequence
  Description of Artificial Sequence:  Nucleic Acid
  misc_feature (1)..(4): phosphorothioate linkage
  misc_feature (16)..(16): 2'-deoxy-2'-amino derivative
  misc_feature (27)..(27): 2'-deoxy-2'-amino derivative
  misc_feature (1)..(6): 2'-O-Methyl
  misc_feature (8)..(14): 2'-O-Methyl
  misc_feature (18)..(18): 2'-O-Methyl
  misc_feature (20)..(23): 2'-O-Methyl
  misc_feature (26)..(26): 2'-O-Methyl
  misc_feature (28)..(34): 2'-O-Methyl
  misc_feature (35)..(35): n stands for inverted deoxyabasic derivative
uccugggccgaaaggcgagucaaggucuaauuccn

SEQ ID NO: 15954 - RNA, 35 nt, Artificial Sequence
  Description of Artificial Sequence:  Nucleic Acid
  misc_feature (1)..(4): phosphorothioate linkage
  misc_feature (16)..(16): 2'-deoxy-2'-amino derivative
  misc_feature (27)..(27): 2'-deoxy-2'-amino derivative
  misc_feature (1)..(6): 2'-O-Methyl
  misc_feature (8)..(14): 2'-O-Methyl
  misc_feature (18)..(18): 2'-O-Methyl
  misc_feature (20)..(23): 2'-O-Methyl
  misc_feature (26)..(26): 2'-O-Methyl
  misc_feature (28)..(34): 2'-O-Methyl
  misc_feature (35)..(35): n stands for inverted deoxyabasic derivative
uccagggccgaaaggcgagucaaggucuauugagn

SEQ ID NO: 15955 - RNA, 35 nt, Artificial Sequence
  Description of Artificial Sequence:  Nucleic Acid
  misc_feature (1)..(4): phosphorothioate linkage
  misc_feature (16)..(16): 2'-deoxy-2'-amino derivative
  misc_feature (27)..(27): 2'-deoxy-2'-amino derivative
  misc_feature (1)..(6): 2'-O-Methyl
  misc_feature (8)..(14): 2'-O-Methyl
  misc_feature (18)..(18): 2'-O-Methyl
  misc_feature (20)..(23): 2'-O-Methyl
  misc_feature (26)..(26): 2'-O-Methyl
  misc_feature (28)..(34): 2'-O-Methyl
  misc_feature (35)..(35): n stands for inverted deoxyabasic derivative
ggcacggccgaaaggcgagucaaggucuccaaaun

SEQ ID NO: 15956 - RNA, 35 nt, Artificial Sequence
  Description of Artificial Sequence:  Nucleic Acid
  misc_feature (1)..(4): phosphorothioate linkage
  misc_feature (16)..(16): 2'-deoxy-2'-amino derivative
  misc_feature (27)..(27): 2'-deoxy-2'-amino derivative
  misc_feature (1)..(6): 2'-O-Methyl
  misc_feature (8)..(14): 2'-O-Methyl
  misc_feature (18)..(18): 2'-O-Methyl
  misc_feature (20)..(23): 2'-O-Methyl
  misc_feature (26)..(26): 2'-O-Methyl
  misc_feature (28)..(34): 2'-O-Methyl
  misc_feature (35)..(35): n stands for inverted deoxyabasic derivative
ccaacagccgaaaggcgagucaaggucuuacucgn

SEQ ID NO: 15957 - RNA, 37 nt, Artificial Sequence
  Description of Artificial Sequence:  Nucleic Acid
  misc_feature (1)..(4): phosphorothioate linkage
  misc_feature (17)..(17): 2'-deoxy-2'-amino derivative
  misc_feature (28)..(28): 2'-deoxy-2'-amino derivative
  misc_feature (1)..(7): 2'-O-Methyl
  misc_feature (9)..(15): 2'-O-Methyl
  misc_feature (19)..(19): 2'-O-Methyl
  misc_feature (21)..(24): 2'-O-Methyl
  misc_feature (27)..(27): 2'-O-Methyl
  misc_feature (29)..(36): 2'-O-Methyl
  misc_feature (37)..(37): n stands for inverted deoxyabasic derivative
cccaacagccgaaaggcgagucaaggucuuacucggn

SEQ ID NO: 15958 - RNA, 35 nt, Artificial Sequence
  Description of Artificial Sequence:  Nucleic Acid
  misc_feature (1)..(4): phosphorothioate linkage
  misc_feature (16)..(16): 2'-deoxy-2'-amino derivative
  misc_feature (27)..(27): 2'-deoxy-2'-amino derivative
  misc_feature (1)..(6): 2'-O-Methyl
  misc_feature (8)..(14): 2'-O-Methyl
  misc_feature (18)..(18): 2'-O-Methyl
  misc_feature (20)..(23): 2'-O-Methyl
  misc_feature (26)..(26): 2'-O-Methyl
  misc_feature (28)..(34): 2'-O-Methyl
  misc_feature (35)..(35): n stands for inverted deoxyabasic derivative
acccaagccgaaaggcgagucaaggucuacuacun

SEQ ID NO: 15959 - RNA, 35 nt, Artificial Sequence
  Description of Artificial Sequence:  Nucleic Acid
  misc_feature (1)..(4): phosphorothioate linkage
  misc_feature (16)..(16): 2'-deoxy-2'-amino derivative
  misc_feature (27)..(27): 2'-deoxy-2'-amino derivative
  misc_feature (1)..(6): 2'-O-Methyl
  misc_feature (8)..(14): 2'-O-Methyl
  misc_feature (18)..(18): 2'-O-Methyl
  misc_feature (20)..(23): 2'-O-Methyl
  misc_feature (26)..(26): 2'-O-Methyl
  misc_feature (28)..(34): 2'-O-Methyl
  misc_feature (35)..(35): n stands for inverted deoxyabasic derivative
cuuucggccgaaaggcgagucaaggucugacccan

SEQ ID NO: 15960 - RNA, 35 nt, Artificial Sequence
  Description of Artificial Sequence:  Nucleic Acid
  misc_feature (1)..(4): phosphorothioate linkage
  misc_feature (16)..(16): 2'-deoxy-2'-amino derivative
  misc_feature (27)..(27): 2'-deoxy-2'-amino derivative
  misc_feature (1)..(6): 2'-O-Methyl
  misc_feature (8)..(14): 2'-O-Methyl
  misc_feature (18)..(18): 2'-O-Methyl
  misc_feature (20)..(23): 2'-O-Methyl
  misc_feature (26)..(26): 2'-O-Methyl
  misc_feature (28)..(34): 2'-O-Methyl
  misc_feature (35)..(5): n stands for inverted deoxyabasic derivative
guaccagccgaaaggcgagucaaggucuaaggccn

SEQ ID NO: 15961 - RNA, 35 nt, Artificial Sequence
  Description of Artificial Sequence:  Nucleic Acid
  misc_feature (1)..(4): phosphorothioate linkage
  misc_feature (16)..(16): 2'-deoxy-2'-amino derivative
  misc_feature (27)..(27): 2'-deoxy-2'-amino derivative
  misc_feature (1)..(6): 2'-O-Methyl
  misc_feature (8)..(14): 2'-O-Methyl
  misc_feature (18)..(18): 2'-O-Methyl
  misc_feature (20)..(23): 2'-O-Methyl
  misc_feature (26)..(26): 2'-O-Methyl
  misc_feature (28)..(34): 2'-O-Methyl
  misc_feature (35)..(35): n stands for inverted deoxyabasic derivative
aucagggccgaaaggcgagucaaggucuaguaccn

SEQ ID NO: 15962 - RNA, 35 nt, Artificial Sequence
  Description of Artificial Sequence:  Nucleic Acid
  misc_feature (1)..(4): phosphorothioate linkage
  misc_feature (16)..(16): 2'-deoxy-2'-amino derivative
  misc_feature (27)..(27): 2'-deoxy-2'-amino derivative
  misc_feature (1)..(6): 2'-O-Methyl
  misc_feature (8)..(14): 2'-O-Methyl
  misc_feature (18)..(18): 2'-O-Methyl
  misc_feature (20)..(23): 2'-O-Methyl
  misc_feature (26)..(26): 2'-O-Methyl
  misc_feature (28)..(34): 2'-O-Methyl
  misc_feature (35)..(35): n stands for inverted deoxyabasic derivative
cgcaaggccgaaaggcgagucaaggucuacccuan

SEQ ID NO: 15963 - RNA, 35 nt, Artificial Sequence
  Description of Artificial Sequence:  Nucleic Acid
  misc_feature (1)..(4): phosphorothioate linkage
  misc_feature (16)..(16): 2'-deoxy-2'-amino derivative
  misc_feature (27)..(27): 2'-deoxy-2'-amino derivative
  misc_feature (1)..(6): 2'-O-Methyl
  misc_feature (8)..(14): 2'-O-Methyl
  misc_feature (18)..(18): 2'-O-Methyl
  misc_feature (20)..(23): 2'-O-Methyl
  misc_feature (26)..(26): 2'-O-Methyl
  misc_feature (28)..(34): 2'-O-Methyl
  misc_feature (35)..(35): n stands for inverted deoxyabasic derivative
cacucggccgaaaggcgagucaaggucuaagcacn

SEQ ID NO: 15964 - RNA, 35 nt, Artificial Sequence
  Description of Artificial Sequence:  Nucleic Acid
  misc_feature (1)..(4): phosphorothioate linkage
  misc_feature (16)..(16): 2'-deoxy-2'-amino derivative
  misc_feature (27)..(27): 2'-deoxy-2'-amino derivative
  misc_feature (1)..(6): 2'-O-Methyl
  misc_feature (8)..(14): 2'-O-Methyl
  misc_feature (18)..(18): 2'-O-Methyl
  misc_feature (20)..(23): 2'-O-Methyl
  misc_feature (26)..(26): 2'-O-Methyl
  misc_feature (28)..(34): 2'-O-Methyl
  misc_feature (35)..(35): n stands for inverted deoxyabasic derivative
acgagagccgaaaggcgagucaaggucucucccgn

SEQ ID NO: 15965 - RNA, 37 nt, Artificial Sequence
  Description of Artificial Sequence:  Nucleic Acid
  misc_feature (1)..(4): phosphorothioate linkage
  misc_feature (17)..(17): 2'-deoxy-2'-amino derivative
  misc_feature (28)..(28): 2'-deoxy-2'-amino derivative
  misc_feature (1)..(7): 2'-O-Methyl
  misc_feature (9)..(15): 2'-O-Methyl
  misc_feature (19)..(19): 2'-O-Methyl
  misc_feature (21)..(24): 2'-O-Methyl
  misc_feature (27)..(27): 2'-O-Methyl
  misc_feature (29)..(36): 2'-O-Methyl
  misc_feature (37)..(37): n stands for inverted deoxyabasic derivative
uacgagagccgaaaggcgagucaaggucucucccggn

SEQ ID NO: 15966 - RNA, 37 nt, Artificial Sequence
  Description of Artificial Sequence:  Nucleic Acid
  misc_feature (1)..(4): phosphorothioate linkage
  misc_feature (17)..(17): 2'-deoxy-2'-amino derivative
  misc_feature (28)..(28): 2'-deoxy-2'-amino derivative
  misc_feature (1)..(7): 2'-O-Methyl
  misc_feature (9)..(15): 2'-O-Methyl
  misc_feature (19)..(19): 2'-O-Methyl
  misc_feature (21)..(24): 2'-O-Methyl
  misc_feature (27)..(27): 2'-O-Methyl
  misc_feature (29)..(36): 2'-O-Methyl
  misc_feature (37)..(37): n stands for inverted deoxyabasic derivative
cuagacggccgaaaggcgagucaaggucuuuucugcn

SEQ ID NO: 15967 - RNA, 35 nt, Artificial Sequence
  Description of Artificial Sequence:  Nucleic Acid
  misc_feature (1)..(4): phosphorothioate linkage
  misc_feature (16)..(16): 2'-deoxy-2'-amino derivative
  misc_feature (27)..(27): 2'-deoxy-2'-amino derivative
  misc_feature (1)..(6): 2'-O-Methyl
  misc_feature (8)..(14): 2'-O-Methyl
  misc_feature (18)..(18): 2'-O-Methyl
  misc_feature (20)..(23): 2'-O-Methyl
  misc_feature (26)..(26): 2'-O-Methyl
  misc_feature (28)..(34): 2'-O-Methyl
  misc_feature (35)..(35): n stands for inverted deoxyabasic derivative
agaccagccgaaaggcgagucaaggucuuauggcn

SEQ ID NO: 15968 - RNA, 37 nt, Artificial Sequence
  Description of Artificial Sequence:  Nucleic Acid
  misc_feature (1)..(4): phosphorothioate linkage
  misc_feature (17)..(17): 2'-deoxy-2'-amino derivative
  misc_feature (28)..(28): 2'-deoxy-2'-amino derivative
  misc_feature (1)..(7): 2'-O-Methyl
  misc_feature (9)..(15): 2'-O-Methyl
  misc_feature (19)..(19): 2'-O-Methyl
  misc_feature (21)..(24): 2'-O-Methyl
  misc_feature (27)..(27): 2'-O-Methyl
  misc_feature (29)..(36): 2'-O-Methyl
  misc_feature (37)..(37): n stands for inverted deoxyabasic derivative
cacaagggccgaaaggcgagucaaggucucuuucgcn

SEQ ID NO: 15969 - RNA, 35 nt, Artificial Sequence
  Description of Artificial Sequence:  Nucleic Acid
  misc_feature (1)..(4): phosphorothioate linkage
  misc_feature (16)..(16): 2'-deoxy-2'-amino derivative
  misc_feature (27)..(27): 2'-deoxy-2'-amino derivative
  misc_feature (1)..(6): 2'-O-Methyl
  misc_feature (8)..(14): 2'-O-Methyl
  misc_feature (18)..(18): 2'-O-Methyl
  misc_feature (20)..(23): 2'-O-Methyl
  misc_feature (26)..(26): 2'-O-Methyl
  misc_feature (28)..(34): 2'-O-Methyl
  misc_feature (35)..(35): n stands for inverted deoxyabasic derivative
gguguagccgaaaggcgagucaaggucuucaccgn

SEQ ID NO: 15970 - RNA, 35 nt, Artificial Sequence
  Description of Artificial Sequence:  Nucleic Acid
  misc_feature (1)..(4): phosphorothioate linkage
  misc_feature (16)..(16): 2'-deoxy-2'-amino derivative
  misc_feature (27)..(27): 2'-deoxy-2'-amino derivative
  misc_feature (1)..(6): 2'-O-Methyl
  misc_feature (8)..(14): 2'-O-Methyl
  misc_feature (18)..(18): 2'-O-Methyl
  misc_feature (20)..(23): 2'-O-Methyl
  misc_feature (26)..(26): 2'-O-Methyl
  misc_feature (28)..(34): 2'-O-Methyl
  misc_feature (35)..(35): n stands for inverted deoxyabasic derivative
uuucuggccgaaaggcgagucaaggucugugaagn

SEQ ID NO: 15971 - RNA, 35 nt, Artificial Sequence
  Description of Artificial Sequence:  Nucleic Acid
  misc_feature (1)..(4): phosphorothioate linkage
  misc_feature (16)..(16): 2'-deoxy-2'-amino derivative
  misc_feature (27)..(27): 2'-deoxy-2'-amino derivative
  misc_feature (1)..(6): 2'-O-Methyl
  misc_feature (8)..(14): 2'-O-Methyl
  misc_feature (18)..(18): 2'-O-Methyl
  misc_feature (20)..(23): 2'-O-Methyl
  misc_feature (26)..(26): 2'-O-Methyl
  misc_feature (28)..(34): 2'-O-Methyl
  misc_feature (35)..(35): n stands for inverted deoxyabasic derivative
cucauagccgaaaggcgagucaaggucuuaacgcn

SEQ ID NO: 15972 - RNA, 37 nt, Artificial Sequence
  Description of Artificial Sequence:  Nucleic Acid
  misc_feature (1)..(4): phosphorothioate linkage
  misc_feature (17)..(17): 2'-deoxy-2'-amino derivative
  misc_feature (28)..(28): 2'-deoxy-2'-amino derivative
  misc_feature (1)..(7): 2'-O-Methyl
  misc_feature (9)..(15): 2'-O-Methyl
  misc_feature (19)..(19): 2'-O-Methyl
  misc_feature (21)..(24): 2'-O-Methyl
  misc_feature (27)..(27): 2'-O-Methyl
  misc_feature (29)..(36): 2'-O-Methyl
  misc_feature (37)..(37): n stands for inverted deoxyabasic derivative
cagaccagccgaaaggcgagucaaggucuuauggcun

SEQ ID NO: 15973 - RNA, 35 nt, Artificial Sequence
  Description of Artificial Sequence:  Nucleic Acid
  misc_feature (1)..(4): phosphorothioate linkage
  misc_feature (16)..(16): 2'-deoxy-2'-amino derivative
  misc_feature (27)..(27): 2'-deoxy-2'-amino derivative
  misc_feature (1)..(6): 2'-O-Methyl
  misc_feature (8)..(14): 2'-O-Methyl
  misc_feature (18)..(18): 2'-O-Methyl
  misc_feature (20)..(23): 2'-O-Methyl
  misc_feature (26)..(26): 2'-O-Methyl
  misc_feature (28)..(34): 2'-O-Methyl
  misc_feature (35)..(35): n stands for inverted deoxyabasic derivative
uacucagccgaaaggcgagucaaggucucgguucn

SEQ ID NO: 15974 - RNA, 37 nt, Artificial Sequence
  Description of Artificial Sequence:  Nucleic Acid
  misc_feature (1)..(4): phosphorothioate linkage
  misc_feature (17)..(17): 2'-deoxy-2'-amino derivative
  misc_feature (28)..(28): 2'-deoxy-2'-amino derivative
  misc_feature (1)..(7): 2'-O-Methyl
  misc_feature (9)..(15): 2'-O-Methyl
  misc_feature (19)..(19): 2'-O-Methyl
  misc_feature (21)..(24): 2'-O-Methyl
  misc_feature (27)..(27): 2'-O-Methyl
  misc_feature (29)..(36): 2'-O-Methyl
  misc_feature (37)..(37): n stands for inverted deoxyabasic derivative
cgguguagccgaaaggcgagucaaggucuucaccggn

SEQ ID NO: 15975 - RNA, 35 nt, Artificial Sequence
  Description of Artificial Sequence:  Nucleic Acid
  misc_feature (1)..(4): phosphorothioate linkage
  misc_feature (16)..(16): 2'-deoxy-2'-amino derivative
  misc_feature (27)..(27): 2'-deoxy-2'-amino derivative
  misc_feature (1)..(6): 2'-O-Methyl
  misc_feature (8)..(14): 2'-O-Methyl
  misc_feature (18)..(18): 2'-O-Methyl
  misc_feature (20)..(23): 2'-O-Methyl
  misc_feature (26)..(26): 2'-O-Methyl
  misc_feature (28)..(34): 2'-O-Methyl
  misc_feature (35)..(35): n stands for inverted deoxyabasic derivative
ggcuaggccgaaaggcgagucaaggucuagucucn

SEQ ID NO: 15976 - RNA, 37 nt, Artificial Sequence
  Description of Artificial Sequence:  Nucleic Acid
  misc_feature (1)..(4): phosphorothioate linkage
  misc_feature (17)..(17): 2'-deoxy-2'-amino derivative
  misc_feature (28)..(28): 2'-deoxy-2'-amino derivative
  misc_feature (1)..(7): 2'-O-Methyl
  misc_feature (9)..(15): 2'-O-Methyl
  misc_feature (19)..(19): 2'-O-Methyl
  misc_feature (21)..(24): 2'-O-Methyl
  misc_feature (27)..(27): 2'-O-Methyl
  misc_feature (29)..(36): 2'-O-Methyl
  misc_feature (37)..(37): n stands for inverted deoxyabasic derivative
cggcuaggccgaaaggcgagucaaggucuagucucgn

SEQ ID NO: 15977 - RNA, 35 nt, Artificial Sequence
  Description of Artificial Sequence:  Nucleic Acid
  misc_feature (1)..(4): phosphorothioate linkage
  misc_feature (16)..(16): 2'-deoxy-2'-amino derivative
  misc_feature (27)..(27): 2'-deoxy-2'-amino derivative
  misc_feature (1)..(6): 2'-O-Methyl
  misc_feature (8)..(14): 2'-O-Methyl
  misc_feature (18)..(18): 2'-O-Methyl
  misc_feature (20)..(23): 2'-O-Methyl
  misc_feature (26)..(26): 2'-O-Methyl
  misc_feature (28)..(34): 2'-O-Methyl
  misc_feature (35)..(35): n stands for inverted deoxyabasic derivative
acaagggccgaaaggcgagucaaggucucuuucgn

SEQ ID NO: 15978 - RNA, 35 nt, Artificial Sequence
  Description of Artificial Sequence:  Nucleic Acid
  misc_feature (1)..(4): phosphorothioate linkage
  misc_feature (16)..(16): 2'-deoxy-2'-amino derivative
  misc_feature (27)..(27): 2'-deoxy-2'-amino derivative
  misc_feature (1)..(6): 2'-O-Methyl
  misc_feature (8)..(14): 2'-O-Methyl
  misc_feature (18)..(18): 2'-O-Methyl
  misc_feature (20)..(23): 2'-O-Methyl
  misc_feature (26)..(26): 2'-O-Methyl
  misc_feature (28)..(34): 2'-O-Methyl
  misc_feature (35)..(35): n stands for inverted deoxyabasic derivative
gcaguagccgaaaggcgagucaaggucucacaagn

SEQ ID NO: 15979 - RNA, 35 nt, Artificial Sequence
  Description of Artificial Sequence:  Nucleic Acid
  misc_feature (1)..(4): phosphorothioate linkage
  misc_feature (16)..(16): 2'-deoxy-2'-amino derivative
  misc_feature (27)..(27): 2'-deoxy-2'-amino derivative
  misc_feature (1)..(6): 2'-O-Methyl
  misc_feature (8)..(14): 2'-O-Methyl
  misc_feature (18)..(18): 2'-O-Methyl
  misc_feature (20)..(23): 2'-O-Methyl
  misc_feature (26)..(26): 2'-O-Methyl
  misc_feature (28)..(34): 2'-O-Methyl
  misc_feature (35)..(35): n stands for inverted deoxyabasic derivative
caagcagccgaaaggcgagucaaggucuccuaucn

SEQ ID NO: 15980 - RNA, 35 nt, Artificial Sequence
  Description of Artificial Sequence:  Nucleic Acid
  misc_feature (1)..(4): phosphorothioate linkage
  misc_feature (16)..(16): 2'-deoxy-2'-amino derivative
  misc_feature (27)..(27): 2'-deoxy-2'-amino derivative
  misc_feature (1)..(6): 2'-O-Methyl
  misc_feature (8)..(14): 2'-O-Methyl
  misc_feature (18)..(18): 2'-O-Methyl
  misc_feature (20)..(23): 2'-O-Methyl
  misc_feature (26)..(26): 2'-O-Methyl
  misc_feature (28)..(34): 2'-O-Methyl
  misc_feature (35)..(35): n stands for inverted deoxyabasic derivative
ggucuagccgaaaggcgagucaaggucugagaccn

SEQ ID NO: 15981 - RNA, 37 nt, Artificial Sequence
  Description of Artificial Sequence:  Nucleic Acid
  misc_feature (1)..(4): phosphorothioate linkage
  misc_feature (17)..(17): 2'-deoxy-2'-amino derivative
  misc_feature (28)..(28): 2'-deoxy-2'-amino derivative
  misc_feature (1)..(7): 2'-O-Methyl
  misc_feature (9)..(15): 2'-O-Methyl
  misc_feature (19)..(19): 2'-O-Methyl
  misc_feature (21)..(24): 2'-O-Methyl
  misc_feature (27)..(27): 2'-O-Methyl
  misc_feature (29)..(36): 2'-O-Methyl
  misc_feature (37)..(37): n stands for inverted deoxyabasic derivative
cggucuagccgaaaggcgagucaaggucugagaccun

SEQ ID NO: 15982 - RNA, 35 nt, Artificial Sequence
  Description of Artificial Sequence:  Nucleic Acid
  misc_feature (1)..(4): phosphorothioate linkage
  misc_feature (16)..(16): 2'-deoxy-2'-amino derivative
  misc_feature (27)..(27): 2'-deoxy-2'-amino derivative
  misc_feature (1)..(6): 2'-O-Methyl
  misc_feature (8)..(14): 2'-O-Methyl
  misc_feature (18)..(18): 2'-O-Methyl
  misc_feature (20)..(23): 2'-O-Methyl
  misc_feature (26)..(26): 2'-O-Methyl
  misc_feature (28)..(34): 2'-O-Methyl
  misc_feature (35)..(35): n stands for inverted deoxyabasic derivative
ggugcagccgaaaggcgagucaaggucuggucuan

SEQ ID NO: 15983 - RNA, 37 nt, Artificial Sequence
  Description of Artificial Sequence:  Nucleic Acid
  misc_feature (1)..(4): phosphorothioate linkage
  misc_feature (9)..(9): 2'-deoxy-2'-C-allyl derivative
  misc_feature (1)..(8): 2'-O-Methyl
  misc_feature (12)..(12): 2'-O-Methyl
  misc_feature (14)..(26): 2'-O-Methyl
  misc_feature (28)..(29): 2'-O-Methyl
  misc_feature (31)..(36): 2'-O-Methyl
  misc_feature (37)..(37): n stands for inverted deoxyabasic derivative
uuucuuucugaugaggccguuaggccgaaagguuuan

SEQ ID NO: 15984 - RNA, 37 nt, Artificial Sequence
  Description of Artificial Sequence:  Nucleic Acid
  misc_feature (1)..(4): phosphorothioate linkage
  misc_feature (9)..(9): 2'-deoxy-2'-C-allyl derivative
  misc_feature (1)..(8): 2'-O-Methyl
  misc_feature (12)..(12): 2'-O-Methyl
  misc_feature (14)..(26): 2'-O-Methyl
  misc_feature (28)..(29): 2'-O-Methyl
  misc_feature (31)..(36): 2'-O-Methyl
  misc_feature (37)..(37): n stands for inverted deoxyabasic derivative
uuggugucugaugaggccguuaggccgaaacguuugn

SEQ ID NO: 15985 - RNA, 37 nt, Artificial Sequence
  Description of Artificial Sequence:  Nucleic Acid
  misc_feature (1)..(4): phosphorothioate linkage
  misc_feature (9)..(9): 2'-deoxy-2'-C-allyl derivative
  misc_feature (1)..(8): 2'-O-Methyl
  misc_feature (12)..(12): 2'-O-Methyl
  misc_feature (14)..(26): 2'-O-Methyl
  misc_feature (28)..(29): 2'-O-Methyl
  misc_feature (31)..(36): 2'-O-Methyl
  misc_feature (37)..(37): n stands for inverted deoxyabasic derivative
ugugggccugaugaggccguuaggccgaaacgguugn

SEQ ID NO: 15986 - RNA, 37 nt, Artificial Sequence
  Description of Artificial Sequence:  Nucleic Acid
  misc_feature (1)..(4): phosphorothioate linkage
  misc_feature (9)..(9): 2'-deoxy-2'-C-allyl derivative
  misc_feature (1)..(8): 2'-O-Methyl
  misc_feature (12)..(12): 2'-O-Methyl
  misc_feature (14)..(26): 2'-O-Methyl
  misc_feature (28)..(29): 2'-O-Methyl
  misc_feature (31)..(36): 2'-O-Methyl
  misc_feature (37)..(37): n stands for inverted deoxyabasic derivative
agguugucugaugaggccguuaggccgaaaccgcucn

SEQ ID NO: 15987 - RNA, 37 nt, Artificial Sequence
  Description of Artificial Sequence:  Nucleic Acid
  misc_feature (1)..(4): phosphorothioate linkage
  misc_feature (9)..(9): 2'-deoxy-2'-C-allyl derivative
  misc_feature (1)..(8): 2'-O-Methyl
  misc_feature (12)..(12): 2'-O-Methyl
  misc_feature (14)..(26): 2'-O-Methyl
  misc_feature (28)..(29): 2'-O-Methyl
  misc_feature (31)..(36): 2'-O-Methyl
  misc_feature (37)..(37): n stands for inverted deoxyabasic derivative
uaucgaucugaugaggccguuaggccgaaaccuuacn

SEQ ID NO: 15988 - RNA, 23 nt, Artificial Sequence
  Description of Artificial Sequence:  Nucleic Acid
  misc_feature (1)..(22): phosphorothioate linkage
  misc_feature (1)..(23): 2'-O-Methyl
ugguggcuccaucuuagcccuag

SEQ ID NO: 15989 - RNA, 23 nt, Artificial Sequence
  Description of Artificial Sequence:  Nucleic Acid
  misc_feature (1)..(22): phosphorothioate linkage
  misc_feature (1)..(23): 2'-O-Methyl
gguggcuccaucuuagcccuagu

SEQ ID NO: 15990 - RNA, 23 nt, Artificial Sequence
  Description of Artificial Sequence:  Nucleic Acid
  misc_feature (1)..(22): phosphorothioate linkage
  misc_feature (1)..(23): 2'-O-Methyl
guggcuccaucuuagcccuaguc

SEQ ID NO: 15991 - RNA, 23 nt, Artificial Sequence
  Description of Artificial Sequence:  Nucleic Acid
  misc_feature (1)..(22): phosphorothioate linkage
  misc_feature (1)..(23): 2'-O-Methyl
uggcuccaucuuagcccuaguca

SEQ ID NO: 15992 - RNA, 23 nt, Artificial Sequence
  Description of Artificial Sequence:  Nucleic Acid
  misc_feature (1)..(22): phosphorothioate linkage
  misc_feature (1)..(23): 2'-O-Methyl
ggcuccaucuuagcccuagucac

SEQ ID NO: 15993 - RNA, 23 nt, Artificial Sequence
  Description of Artificial Sequence:  Nucleic Acid
  misc_feature (1)..(22): phosphorothioate linkage
  misc_feature (1)..(23): 2'-O-Methyl
gcuccaucuuagcccuagucacg

SEQ ID NO: 15994 - RNA, 23 nt, Artificial Sequence
  Description of Artificial Sequence:  Nucleic Acid
  misc_feature (1)..(22): phosphorothioate linkage
  misc_feature (1)..(23): 2'-O-Methyl
cuccaucuuagcccuagucacgg

SEQ ID NO: 15995 - RNA, 23 nt, Artificial Sequence
  Description of Artificial Sequence:  Nucleic Acid
  misc_feature (1)..(22): phosphorothioate linkage
  misc_feature (1)..(23): 2'-O-Methyl
uccaucuuagcccuagucacggc

SEQ ID NO: 15996 - RNA, 23 nt, Artificial Sequence
  Description of Artificial Sequence:  Nucleic Acid
  misc_feature (1)..(22): phosphorothioate linkage
  misc_feature (1)..(23): 2'-O-Methyl
ccaucuuagcccuagucacggcu

SEQ ID NO: 15997 - RNA, 23 nt, Artificial Sequence
  Description of Artificial Sequence:  Nucleic Acid
  misc_feature (1)..(22): phosphorothioate linkage
  misc_feature (1)..(23): 2'-O-Methyl
caucuuagcccuagucacggcua

SEQ ID NO: 15998 - RNA, 23 nt, Artificial Sequence
  Description of Artificial Sequence:  Nucleic Acid
  misc_feature (1)..(22): phosphorothioate linkage
  misc_feature (1)..(23): 2'-O-Methyl
aucuuagcccuagucacggcuag

SEQ ID NO: 15999 - RNA, 23 nt, Artificial Sequence
  Description of Artificial Sequence:  Nucleic Acid
  misc_feature (1)..(22): phosphorothioate linkage
  misc_feature (1)..(23): 2'-O-Methyl
ucuuagcccuagucacggcuagc

SEQ ID NO: 16000 - RNA, 23 nt, Artificial Sequence
  Description of Artificial Sequence:  Nucleic Acid
  misc_feature (1)..(22): phosphorothioate linkage
  misc_feature (1)..(23): 2'-O-Methyl
cuuagcccuagucacggcuagcu

SEQ ID NO: 16001 - RNA, 23 nt, Artificial Sequence
  Description of Artificial Sequence:  Nucleic Acid
  misc_feature (1)..(22): phosphorothioate linkage
  misc_feature (1)..(23): 2'-O-Methyl
uuagcccuagucacggcuagcug

SEQ ID NO: 16002 - RNA, 23 nt, Artificial Sequence
  Description of Artificial Sequence:  Nucleic Acid
  misc_feature (1)..(22): phosphorothioate linkage
  misc_feature (1)..(23): 2'-O-Methyl
uagcccuagucacggcuagcugu

SEQ ID NO: 16003 - RNA, 23 nt, Artificial Sequence
  Description of Artificial Sequence:  Nucleic Acid
  misc_feature (1)..(22): phosphorothioate linkage
  misc_feature (1)..(23): 2'-O-Methyl
agcccuagucacggcuagcugug

SEQ ID NO: 16004 - RNA, 23 nt, Artificial Sequence
  Description of Artificial Sequence:  Nucleic Acid
  misc_feature (1)..(22): phosphorothioate linkage
  misc_feature (1)..(23): 2'-O-Methyl
gcccuagucacggcuagcuguga

SEQ ID NO: 16005 - RNA, 23 nt, Artificial Sequence
  Description of Artificial Sequence:  Nucleic Acid
  misc_feature (1)..(22): phosphorothioate linkage
  misc_feature (1)..(23): 2'-O-Methyl
cccuagucacggcuagcugugaa

SEQ ID NO: 16006 - RNA, 23 nt, Artificial Sequence
  Description of Artificial Sequence:  Nucleic Acid
  misc_feature (1)..(22): phosphorothioate linkage
  misc_feature (1)..(23): 2'-O-Methyl
ccuagucacggcuagcugugaaa

SEQ ID NO: 16007 - RNA, 23 nt, Artificial Sequence
  Description of Artificial Sequence:  Nucleic Acid
  misc_feature (1)..(22): phosphorothioate linkage
  misc_feature (1)..(23): 2'-O-Methyl
cuagucacggcuagcugugaaag

SEQ ID NO: 16008 - RNA, 23 nt, Artificial Sequence
  Description of Artificial Sequence:  Nucleic Acid
  misc_feature (1)..(22): phosphorothioate linkage
  misc_feature (1)..(23): 2'-O-Methyl
uagucacggcuagcugugaaagg

SEQ ID NO: 16009 - RNA, 23 nt, Artificial Sequence
  Description of Artificial Sequence:  Nucleic Acid
  misc_feature (1)..(22): phosphorothioate linkage
  misc_feature (1)..(23): 2'-O-Methyl
agucacggcuagcugugaaaggu

SEQ ID NO: 16010 - RNA, 23 nt, Artificial Sequence
  Description of Artificial Sequence:  Nucleic Acid
  misc_feature (1)..(22): phosphorothioate linkage
  misc_feature (1)..(23): 2'-O-Methyl
gucacggcuagcugugaaagguc

SEQ ID NO: 16011 - RNA, 23 nt, Artificial Sequence
  Description of Artificial Sequence:  Nucleic Acid
  misc_feature (1)..(22): phosphorothioate linkage
  misc_feature (1)..(23): 2'-O-Methyl
ucacggcuagcugugaaaggucc

SEQ ID NO: 16012 - RNA, 23 nt, Artificial Sequence
  Description of Artificial Sequence:  Nucleic Acid
  misc_feature (1)..(22): phosphorothioate linkage
  misc_feature (1)..(23): 2'-O-Methyl
cacggcuagcugugaaagguccg

SEQ ID NO: 16013 - RNA, 23 nt, Artificial Sequence
  Description of Artificial Sequence:  Nucleic Acid
  misc_feature (1)..(22): phosphorothioate linkage
  misc_feature (1)..(23): 2'-O-Methyl
acggcuagcugugaaagguccgu

SEQ ID NO: 16014 - RNA, 23 nt, Artificial Sequence
  Description of Artificial Sequence:  Nucleic Acid
  misc_feature (1)..(22): phosphorothioate linkage
  misc_feature (1)..(23): 2'-O-Methyl
cggcuagcugugaaagguccgug

SEQ ID NO: 16015 - RNA, 23 nt, Artificial Sequence
  Description of Artificial Sequence:  Nucleic Acid
  misc_feature (1)..(22): phosphorothioate linkage
  misc_feature (1)..(23): 2'-O-Methyl
ggcuagcugugaaagguccguga

SEQ ID NO: 16016 - RNA, 23 nt, Artificial Sequence
  Description of Artificial Sequence:  Nucleic Acid
  misc_feature (1)..(22): phosphorothioate linkage
  misc_feature (1)..(23): 2'-O-Methyl
gcuagcugugaaagguccgugag

SEQ ID NO: 16017 - RNA, 23 nt, Artificial Sequence
  Description of Artificial Sequence:  Nucleic Acid
  misc_feature (1)..(22): phosphorothioate linkage
  misc_feature (1)..(23): 2'-O-Methyl
cuagcugugaaagguccgugagc

SEQ ID NO: 16018 - RNA, 23 nt, Artificial Sequence
  Description of Artificial Sequence:  Nucleic Acid
  misc_feature (1)..(22): phosphorothioate linkage
  misc_feature (1)..(23): 2'-O-Methyl
gcaugacugcagagagugcugau

SEQ ID NO: 16019 - RNA, 23 nt, Artificial Sequence
  Description of Artificial Sequence:  Nucleic Acid
  misc_feature (1)..(22): phosphorothioate linkage
  misc_feature (1)..(23): 2'-O-Methyl
caugacugcagagagugcugaua

SEQ ID NO: 16020 - RNA, 23 nt, Artificial Sequence
  Description of Artificial Sequence:  Nucleic Acid
  misc_feature (1)..(22): phosphorothioate linkage
  misc_feature (1)..(23): 2'-O-Methyl
augacugcagagagugcugauac

SEQ ID NO: 16021 - RNA, 23 nt, Artificial Sequence
  Description of Artificial Sequence:  Nucleic Acid
  misc_feature (1)..(22): phosphorothioate linkage
  misc_feature (1)..(23): 2'-O-Methyl
ugacugcagagagugcugauacu

SEQ ID NO: 16022 - RNA, 23 nt, Artificial Sequence
  Description of Artificial Sequence:  Nucleic Acid
  misc_feature (1)..(22): phosphorothioate linkage
  misc_feature (1)..(23): 2'-O-Methyl
gacugcagagagugcugauacug

SEQ ID NO: 16023 - RNA, 23 nt, Artificial Sequence
  Description of Artificial Sequence:  Nucleic Acid
  misc_feature (1)..(22): phosphorothioate linkage
  misc_feature (1)..(23): 2'-O-Methyl
acugcagagagugcugauacugg

SEQ ID NO: 16024 - RNA, 23 nt, Artificial Sequence
  Description of Artificial Sequence:  Nucleic Acid
  misc_feature (1)..(22): phosphorothioate linkage
  misc_feature (1)..(23): 2'-O-Methyl
cugcagagagugcugauacuggc

SEQ ID NO: 16025 - RNA, 23 nt, Artificial Sequence
  Description of Artificial Sequence:  Nucleic Acid
  misc_feature (1)..(22): phosphorothioate linkage
  misc_feature (1)..(23): 2'-O-Methyl
ugcagagagugcugauacuggcc

SEQ ID NO: 16026 - RNA, 23 nt, Artificial Sequence
  Description of Artificial Sequence:  Nucleic Acid
  misc_feature (1)..(22): phosphorothioate linkage
  misc_feature (1)..(23): 2'-O-Methyl
gcagagagugcugauacuggccu

SEQ ID NO: 16027 - RNA, 23 nt, Artificial Sequence
  Description of Artificial Sequence:  Nucleic Acid
  misc_feature (1)..(22): phosphorothioate linkage
  misc_feature (1)..(23): 2'-O-Methyl
cagagagugcugauacuggccuc

SEQ ID NO: 16028 - RNA, 23 nt, Artificial Sequence
  Description of Artificial Sequence:  Nucleic Acid
  misc_feature (1)..(22): phosphorothioate linkage
  misc_feature (1)..(23): 2'-O-Methyl
agagagugcugauacuggccucu

SEQ ID NO: 16029 - RNA, 23 nt, Artificial Sequence
  Description of Artificial Sequence:  Nucleic Acid
  misc_feature (1)..(22): phosphorothioate linkage
  misc_feature (1)..(23): 2'-O-Methyl
gagagugcugauacuggccucuc

SEQ ID NO: 16030 - RNA, 35 nt, Artificial Sequence
  Description of Artificial Sequence:  Nucleic Acid
  misc_feature (1)..(4): phosphorothioate linkage
  misc_feature (29)..(29): n is inosine
  misc_feature (8)..(8): 2'-deoxy-2'-C-allyl derivative
  misc_feature (35)..(35): n stands for inverted deoxyabasic derivative
  misc_feature (1)..(7): 2'-O-Methyl
  misc_feature (11)..(11): 2'-O-Methyl
  misc_feature (13)..(25): 2'-O-Methyl
  misc_feature (27)..(28): 2'-O-Methyl
  misc_feature (30)..(34): 2'-O-Methyl
cucacccugaugaggccguuaggccgaanuuccgn

SEQ ID NO: 16031 - RNA, 35 nt, Artificial Sequence
  Description of Artificial Sequence:  Nucleic Acid
  misc_feature (1)..(4): phosphorothioate linkage
  misc_feature (29)..(29): n is inosine
  misc_feature (8)..(8): 2'-deoxy-2'-C-allyl derivative
  misc_feature (1)..(7): 2'-O-Methyl
  misc_feature (11)..(11): 2'-O-Methyl
  misc_feature (13)..(25): 2'-O-Methyl
  misc_feature (27)..(28): 2'-O-Methyl
  misc_feature (30)..(34): 2'-O-Methyl
  misc_feature (35)..(35): n stands for inverted deoxyabasic derivative
uuccggcugaugaggccguuaggccgaanuacucn

SEQ ID NO: 16032 - RNA, 35 nt, Artificial Sequence
  Description of Artificial Sequence:  Nucleic Acid
  misc_feature (1)..(4): phosphorothioate linkage
  misc_feature (29)..(29): n is inosine
  misc_feature (8)..(8): 2'-deoxy-2'-C-allyl derivative
  misc_feature (1)..(7): 2'-O-Methyl
  misc_feature (11)..(11): 2'-O-Methyl
  misc_feature (13)..(25): 2'-O-Methyl
  misc_feature (27)..(28): 2'-O-Methyl
  misc_feature (30)..(34): 2'-O-Methyl
  misc_feature (35)..(35): n stands for inverted deoxyabasic derivative
cacuaucugaugaggccguuaggccgaancucucn

SEQ ID NO: 16033 - RNA, 35 nt, Artificial Sequence
  Description of Artificial Sequence:  Nucleic Acid
  misc_feature (1)..(4): phosphorothioate linkage
  misc_feature (29)..(29): n is inosine
  misc_feature (8)..(8): 2'-deoxy-2'-C-allyl derivative
  misc_feature (1)..(7): 2'-O-Methyl
  misc_feature (11)..(11): 2'-O-Methyl
  misc_feature (13)..(25): 2'-O-Methyl
  misc_feature (27)..(28): 2'-O-Methyl
  misc_feature (30)..(34): 2'-O-Methyl
  misc_feature (35)..(35): n stands for inverted deoxyabasic derivative
ccacuacugaugaggccguuaggccgaangcucun

SEQ ID NO: 16034 - RNA, 35 nt, Artificial Sequence
  Description of Artificial Sequence:  Nucleic Acid
  misc_feature (1)..(4): phosphorothioate linkage
  misc_feature (29)..(29): n is inosine
  misc_feature (8)..(8): 2'-deoxy-2'-C-allyl derivative
  misc_feature (1)..(7): 2'-O-Methyl
  misc_feature (11)..(11): 2'-O-Methyl
  misc_feature (13)..(25): 2'-O-Methyl
  misc_feature (27)..(28): 2'-O-Methyl
  misc_feature (30)..(34): 2'-O-Methyl
  misc_feature (35)..(5): n stands for inverted deoxyabasic derivative
accacacugaugaggccguuaggccgaangccuun

SEQ ID NO: 16035 - RNA, 35 nt, Artificial Sequence
  Description of Artificial Sequence:  Nucleic Acid
  misc_feature (1)..(4): phosphorothioate linkage
  misc_feature (29)..(29): n is inosine
  misc_feature (8)..(8): 2'-deoxy-2'-C-allyl derivative
  misc_feature (1)..(7): 2'-O-Methyl
  misc_feature (11)..(11): 2'-O-Methyl
  misc_feature (13)..(25): 2'-O-Methyl
  misc_feature (27)..(28): 2'-O-Methyl
  misc_feature (30)..(34): 2'-O-Methyl
  misc_feature (35)..(35): n stands for inverted deoxyabasic derivative
ucuccccugaugaggccguuaggccgaangagggn

SEQ ID NO: 16036 - RNA, 35 nt, Artificial Sequence
  Description of Artificial Sequence:  Nucleic Acid
  misc_feature (1)..(4): phosphorothioate linkage
  misc_feature (29)..(29): n is inosine
  misc_feature (8)..(8): 2'-deoxy-2'-C-allyl derivative
  misc_feature (1)..(7): 2'-O-Methyl
  misc_feature (11)..(11): 2'-O-Methyl
  misc_feature (13)..(25): 2'-O-Methyl
  misc_feature (27)..(28): 2'-O-Methyl
  misc_feature (30)..(34): 2'-O-Methyl
  misc_feature (35)..(35): n stands for inverted deoxyabasic derivative
ccacaacugaugaggccguuaggccgaanccuuun

SEQ ID NO: 16037 - RNA, 35 nt, Artificial Sequence
  Description of Artificial Sequence:  Nucleic Acid
  misc_feature (1)..(4): phosphorothioate linkage
  misc_feature (29)..(29): n is inosine
  misc_feature (8)..(8): 2'-deoxy-2'-C-allyl derivative
  misc_feature (1)..(7): 2'-O-Methyl
  misc_feature (11)..(11): 2'-O-Methyl
  misc_feature (13)..(25): 2'-O-Methyl
  misc_feature (27)..(28): 2'-O-Methyl
  misc_feature (30)..(34): 2'-O-Methyl
  misc_feature (35)..(35): n stands for inverted deoxyabasic derivative
uuccgccugaugaggccguuaggccgaanaccacn

SEQ ID NO: 16038 - RNA, 35 nt, Artificial Sequence
  Description of Artificial Sequence:  Nucleic Acid
  misc_feature (1)..(4): phosphorothioate linkage
  misc_feature (29)..(29): n is inosine
  misc_feature (8)..(8): 2'-deoxy-2'-C-allyl derivative
  misc_feature (1)..(7): 2'-O-Methyl
  misc_feature (11)..(11): 2'-O-Methyl
  misc_feature (13)..(25): 2'-O-Methyl
  misc_feature (27)..(28): 2'-O-Methyl
  misc_feature (30)..(34): 2'-O-Methyl
  misc_feature (35)..(35): n stands for inverted deoxyabasic derivative
caagaacugaugaggccguuaggccgaangacccn

SEQ ID NO: 16039 - RNA, 35 nt, Artificial Sequence
  Description of Artificial Sequence:  Nucleic Acid
  misc_feature (1)..(22): phosphorothioate linkage
  misc_feature (8)..(8): 2'-deoxy-2'-C-allyl derivative
  misc_feature (1)..(7): 2'-O-Methyl
  misc_feature (11)..(11): 2'-O-Methyl
  misc_feature (13)..(25): 2'-O-Methyl
  misc_feature (27)..(28): 2'-O-Methyl
  misc_feature (30)..(34): 2'-O-Methyl
  misc_feature (35)..(35): n stands for inverted deoxyabasic derivative
cuacuccugaugaggccguuaggccgaancuagcn

SEQ ID NO: 16040 - RNA, 35 nt, Artificial Sequence
  Description of Artificial Sequence:  Nucleic Acid
  misc_feature (1)..(22): phosphorothioate linkage
  misc_feature (29)..(29): n is inosine
  misc_feature (8)..(8): 2'-deoxy-2'-C-allyl derivative
  misc_feature (1)..(7): 2'-O-Methyl
  misc_feature (11)..(11): 2'-O-Methyl
  misc_feature (13)..(25): 2'-O-Methyl
  misc_feature (27)..(28): 2'-O-Methyl
  misc_feature (30)..(34): 2'-O-Methyl
  misc_feature (35)..(35): n stands for inverted deoxyabasic derivative
ccuauccugaugaggccguuaggccgaangcagun

SEQ ID NO: 16041 - RNA, 35 nt, Artificial Sequence
  Description of Artificial Sequence:  Nucleic Acid
  misc_feature (1)..(4): phosphorothioate linkage
  misc_feature (29)..(29): n is inosine
  misc_feature (8)..(8): 2'-deoxy-2'-C-allyl derivative
  misc_feature (1)..(7): 2'-O-Methyl
  misc_feature (11)..(11): 2'-O-Methyl
  misc_feature (13)..(25): 2'-O-Methyl
  misc_feature (27)..(28): 2'-O-Methyl
  misc_feature (30)..(34): 2'-O-Methyl
  misc_feature (35)..(35): n stands for inverted deoxyabasic derivative
cuaucacugaugaggccguuaggccgaancaguan

SEQ ID NO: 16042 - RNA, 35 nt, Artificial Sequence
  Description of Artificial Sequence:  Nucleic Acid
  misc_feature (1)..(4): phosphorothioate linkage
  misc_feature (29)..(29): n is inosine
  misc_feature (8)..(8): 2'-deoxy-2'-C-allyl derivative
  misc_feature (1)..(7): 2'-O-Methyl
  misc_feature (11)..(11): 2'-O-Methyl
  misc_feature (13)..(25): 2'-O-Methyl
  misc_feature (27)..(28): 2'-O-Methyl
  misc_feature (30)..(34): 2'-O-Methyl
  misc_feature (35)..(35): n stands for inverted deoxyabasic derivative
ucaggccugaugaggccguuaggccgaanuaccan

SEQ ID NO: 16043 - RNA, 35 nt, Artificial Sequence
  Description of Artificial Sequence:  Nucleic Acid
  misc_feature (1)..(4): phosphorothioate linkage
  misc_feature (29)..(29): n is inosine
  misc_feature (8)..(8): 2'-deoxy-2'-C-allyl derivative
  misc_feature (1)..(7): 2'-O-Methyl
  misc_feature (11)..(11): 2'-O-Methyl
  misc_feature (13)..(25): 2'-O-Methyl
  misc_feature (27)..(28): 2'-O-Methyl
  misc_feature (30)..(34): 2'-O-Methyl
  misc_feature (35)..(35): n stands for inverted deoxyabasic derivative
aauucccugaugaggccguuaggccgaanuguacn

SEQ ID NO: 16044 - RNA, 37 nt, Artificial Sequence
  Description of Artificial Sequence:  Nucleic Acid
  misc_feature (1)..(4): phosphorothioate linkage
  misc_feature (30)..(30): n is inosine
  misc_feature (9)..(9): 2'-deoxy-2'-C-allyl derivative
  misc_feature (1)..(8): 2'-O-Methyl
  misc_feature (12)..(12): 2'-O-Methyl
  misc_feature (14)..(26): 2'-O-Methyl
  misc_feature (28)..(29): 2'-O-Methyl
  misc_feature (31)..(36): 2'-O-Methyl
  misc_feature (37)..(37): n stands for inverted deoxyabasic derivative
ccuaucacugaugaggccguuaggccgaancaguacn

SEQ ID NO: 16045 - RNA, 37 nt, Artificial Sequence
  Description of Artificial Sequence:  Nucleic Acid
  misc_feature (1)..(4): phosphorothioate linkage
  misc_feature (30)..(30): n is inosine
  misc_feature (9)..(9): 2'-deoxy-2'-C-allyl derivative
  misc_feature (1)..(8): 2'-O-Methyl
  misc_feature (12)..(12): 2'-O-Methyl
  misc_feature (14)..(26): 2'-O-Methyl
  misc_feature (28)..(29): 2'-O-Methyl
  misc_feature (31)..(36): 2'-O-Methyl
  misc_feature (37)..(37): n stands for inverted deoxyabasic derivative
cccuauccugaugaggccguuaggccgaangcaguan

SEQ ID NO: 16046 - RNA, 37 nt, Artificial Sequence
  Description of Artificial Sequence:  Nucleic Acid
  misc_feature (1)..(4): phosphorothioate linkage
  misc_feature (30)..(30): n is inosine
  misc_feature (9)..(9): 2'-deoxy-2'-C-allyl derivative
  misc_feature (1)..(8): 2'-O-Methyl
  misc_feature (12)..(12): 2'-O-Methyl
  misc_feature (14)..(26): 2'-O-Methyl
  misc_feature (28)..(29): 2'-O-Methyl
  misc_feature (31)..(36): 2'-O-Methyl
  misc_feature (37)..(37): n stands for inverted deoxyabasic derivative
uaccacacugaugaggccguuaggccgaangccuuun

SEQ ID NO: 16047 - RNA, 35 nt, Artificial Sequence
  Description of Artificial Sequence:  Nucleic Acid
  misc_feature (1)..(4): phosphorothioate linkage
  misc_feature (8)..(8): 2'-deoxy-2'-amino derivative
  misc_feature (11)..(11): 2'-deoxy-2'-amino derivative
  misc_feature (29)..(29): 2'-deoxy-2'-amino derivative
  misc_feature (1)..(7): 2'-O-Methyl
  misc_feature (13)..(25): 2'-O-Methyl
  misc_feature (27)..(28): 2'-O-Methyl
  misc_feature (30)..(34): 2'-O-Methyl
  misc_feature (35)..(35): n stands for inverted deoxyabasic derivative
uccggucugaugaggccguuaggccgaauacucan

SEQ ID NO: 16048 - RNA, 35 nt, Artificial Sequence
  Description of Artificial Sequence:  Nucleic Acid
  misc_feature (1)..(4): phosphorothioate linkage
  misc_feature (8)..(8): 2'-deoxy-2'-amino derivative
  misc_feature (11)..(11): 2'-deoxy-2'-amino derivative
  misc_feature (29)..(29): 2'-deoxy-2'-amino derivative
  misc_feature (1)..(7): 2'-O-Methyl
  misc_feature (13)..(25): 2'-O-Methyl
  misc_feature (27)..(28): 2'-O-Methyl
  misc_feature (30)..(34): 2'-O-Methyl
  misc_feature (35)..(35): n stands for inverted deoxyabasic derivative
auuccgcugaugaggccguuaggccgaauguacun

SEQ ID NO: 16049 - RNA, 35 nt, Artificial Sequence
  Description of Artificial Sequence:  Nucleic Acid
  misc_feature (1)..(4): phosphorothioate linkage
  misc_feature (8)..(8): 2'-deoxy-2'-amino derivative
  misc_feature (11)..(11): 2'-deoxy-2'-amino derivative
  misc_feature (29)..(29): 2'-deoxy-2'-amino derivative
  misc_feature (1)..(7): 2'-O-Methyl
  misc_feature (13)..(25): 2'-O-Methyl
  misc_feature (27)..(28): 2'-O-Methyl
  misc_feature (30)..(34): 2'-O-Methyl
  misc_feature (35)..(35): n stands for inverted deoxyabasic derivative
accacucugaugaggccguuaggccgaauggcucn

SEQ ID NO: 16050 - RNA, 35 nt, Artificial Sequence
  Description of Artificial Sequence:  Nucleic Acid
  misc_feature (1)..(4): phosphorothioate linkage
  misc_feature (8)..(8): 2'-deoxy-2'-amino derivative
  misc_feature (11)..(11): 2'-deoxy-2'-amino derivative
  misc_feature (29)..(29): 2'-deoxy-2'-amino derivative
  misc_feature (1)..(7): 2'-O-Methyl
  misc_feature (13)..(25): 2'-O-Methyl
  misc_feature (27)..(28): 2'-O-Methyl
  misc_feature (30)..(34): 2'-O-Methyl
  misc_feature (35)..(35): n stands for inverted deoxyabasic derivative
ucaccgcugaugaggccguuaggccgaauuccgcn

SEQ ID NO: 16051 - RNA, 35 nt, Artificial Sequence
  Description of Artificial Sequence:  Nucleic Acid
  misc_feature (1)..(4): phosphorothioate linkage
  misc_feature (8)..(8): 2'-deoxy-2'-amino derivative
  misc_feature (11)..(11): 2'-deoxy-2'-amino derivative
  misc_feature (29)..(29): 2'-deoxy-2'-amino derivative
  misc_feature (1)..(7): 2'-O-Methyl
  misc_feature (13)..(25): 2'-O-Methyl
  misc_feature (27)..(28): 2'-O-Methyl
  misc_feature (30)..(34): 2'-O-Methyl
  misc_feature (35)..(35): n stands for inverted deoxyabasic derivative
caccggcugaugaggccguuaggccgaauccgcan

SEQ ID NO: 16052 - RNA, 35 nt, Artificial Sequence
  Description of Artificial Sequence:  Nucleic Acid
  misc_feature (1)..(4): phosphorothioate linkage
  misc_feature (8)..(8): 2'-deoxy-2'-amino derivative
  misc_feature (11)..(11): 2'-deoxy-2'-amino derivative
  misc_feature (29)..(29): 2'-deoxy-2'-amino derivative
  misc_feature (1)..(7): 2'-O-Methyl
  misc_feature (13)..(25): 2'-O-Methyl
  misc_feature (27)..(28): 2'-O-Methyl
  misc_feature (30)..(34): 2'-O-Methyl
  misc_feature (35)..(35): n stands for inverted deoxyabasic derivative
caggcacugaugaggccguuaggccgaauaccacn

SEQ ID NO: 16053 - RNA, 35 nt, Artificial Sequence
  Description of Artificial Sequence:  Nucleic Acid
  misc_feature (1)..(4): phosphorothioate linkage
  misc_feature (8)..(8): 2'-deoxy-2'-amino derivative
  misc_feature (11)..(11): 2'-deoxy-2'-amino derivative
  misc_feature (29)..(29): 2'-deoxy-2'-amino derivative
  misc_feature (1)..(7): 2'-O-Methyl
  misc_feature (13)..(25): 2'-O-Methyl
  misc_feature (27)..(28): 2'-O-Methyl
  misc_feature (30)..(34): 2'-O-Methyl
  misc_feature (35)..(35): n stands for inverted deoxyabasic derivative
cacccucugaugaggccguuaggccgaaucaggcn

SEQ ID NO: 16054 - RNA, 37 nt, Artificial Sequence
  Description of Artificial Sequence:  Nucleic Acid
  misc_feature (1)..(4): phosphorothioate linkage
  misc_feature (9)..(9): 2'-deoxy-2'-amino derivative
  misc_feature (12)..(12): 2'-deoxy-2'-amino derivative
  misc_feature (30)..(30): 2'-deoxy-2'-amino derivative
  misc_feature (1)..(8): 2'-O-Methyl
  misc_feature (14)..(26): 2'-O-Methyl
  misc_feature (28)..(29): 2'-O-Methyl
  misc_feature (31)..(36): 2'-O-Methyl
  misc_feature (37)..(37): n stands for inverted deoxyabasic derivative
uuccggucugaugaggccguuaggccgaauacucacn

SEQ ID NO: 16055 - RNA, 37 nt, Artificial Sequence
  Description of Artificial Sequence:  Nucleic Acid
  misc_feature (1)..(4): phosphorothioate linkage
  misc_feature (9)..(9): 2'-deoxy-2'-amino derivative
  misc_feature (12)..(12): 2'-deoxy-2'-amino derivative
  misc_feature (30)..(30): 2'-deoxy-2'-amino derivative
  misc_feature (1)..(8): 2'-O-Methyl
  misc_feature (14)..(26): 2'-O-Methyl
  misc_feature (28)..(29): 2'-O-Methyl
  misc_feature (31)..(36): 2'-O-Methyl
  misc_feature (37)..(37): n stands for inverted deoxyabasic derivative
gaccacucugaugaggccguuaggccgaauggcucun

SEQ ID NO: 16056 - RNA, 37 nt, Artificial Sequence
  Description of Artificial Sequence:  Nucleic Acid
  misc_feature (1)..(4): phosphorothioate linkage
  misc_feature (9)..(9): 2'-deoxy-2'-amino derivative
  misc_feature (12)..(12): 2'-deoxy-2'-amino derivative
  misc_feature (30)..(30): 2'-deoxy-2'-amino derivative
  misc_feature (1)..(8): 2'-O-Methyl
  misc_feature (14)..(26): 2'-O-Methyl
  misc_feature (28)..(29): 2'-O-Methyl
  misc_feature (31)..(36): 2'-O-Methyl
  misc_feature (37)..(37): n stands for inverted deoxyabasic derivative
cucaccgcugaugaggccguuaggccgaauuccgcan

SEQ ID NO: 16057 - RNA, 37 nt, Artificial Sequence
  Description of Artificial Sequence:  Nucleic Acid
  misc_feature (1)..(4): phosphorothioate linkage
  misc_feature (9)..(9): 2'-deoxy-2'-amino derivative
  misc_feature (12)..(12): 2'-deoxy-2'-amino derivative
  misc_feature (30)..(30): 2'-deoxy-2'-amino derivative
  misc_feature (1)..(8): 2'-O-Methyl
  misc_feature (14)..(26): 2'-O-Methyl
  misc_feature (28)..(29): 2'-O-Methyl
  misc_feature (31)..(36): 2'-O-Methyl
  misc_feature (37)..(37): n stands for inverted deoxyabasic derivative
ucaccggcugaugaggccguuaggccgaauccgcagn

SEQ ID NO: 16058 - RNA, 37 nt, Artificial Sequence
  Description of Artificial Sequence:  Nucleic Acid
  misc_feature (1)..(4): phosphorothioate linkage
  misc_feature (9)..(9): 2'-deoxy-2'-amino derivative
  misc_feature (12)..(12): 2'-deoxy-2'-amino derivative
  misc_feature (30)..(30): 2'-deoxy-2'-amino derivative
  misc_feature (1)..(8): 2'-O-Methyl
  misc_feature (14)..(26): 2'-O-Methyl
  misc_feature (28)..(29): 2'-O-Methyl
  misc_feature (31)..(36): 2'-O-Methyl
  misc_feature (37)..(37): n stands for inverted deoxyabasic derivative
ucaggcacugaugaggccguuaggccgaauaccacan

SEQ ID NO: 16059 - RNA, 37 nt, Artificial Sequence
  Description of Artificial Sequence:  Nucleic Acid
  misc_feature (1)..(4): phosphorothioate linkage
  misc_feature (9)..(9): 2'-deoxy-2'-amino derivative
  misc_feature (12)..(12): 2'-deoxy-2'-amino derivative
  misc_feature (30)..(30): 2'-deoxy-2'-amino derivative
  misc_feature (1)..(8): 2'-O-Methyl
  misc_feature (14)..(26): 2'-O-Methyl
  misc_feature (28)..(29): 2'-O-Methyl
  misc_feature (31)..(36): 2'-O-Methyl
  misc_feature (37)..(37): n stands for inverted deoxyabasic derivative
gcacccucugaugaggccguuaggccgaaucaggcan

SEQ ID NO: 16060 - RNA, 37 nt, Artificial Sequence
  Description of Artificial Sequence:  Nucleic Acid
  misc_feature (1)..(4): phosphorothioate linkage
  misc_feature (9)..(9): 2'-deoxy-2'-amino derivative
  misc_feature (12)..(12): 2'-deoxy-2'-amino derivative
  misc_feature (30)..(30): 2'-deoxy-2'-amino derivative
  misc_feature (1)..(8): 2'-O-Methyl
  misc_feature (14)..(26): 2'-O-Methyl
  misc_feature (28)..(29): 2'-O-Methyl
  misc_feature (31)..(36): 2'-O-Methyl
  misc_feature (37)..(37): n stands for inverted deoxyabasic derivative
aauuccgcugaugaggccguuaggccgaauguacucn

SEQ ID NO: 16061 - RNA, 34 nt, Artificial Sequence
  Description of Artificial Sequence:  Nucleic Acid
  misc_feature (1)..(4): phosphorothioate linkage
  misc_feature (16)..(16): 2'-deoxy-2'-amino derivative
  misc_feature (26)..(26): 2'-deoxy-2'-amino derivative
  misc_feature (1)..(15): 2'-O-Methyl
  misc_feature (17)..(22): 2'-O-Methyl
  misc_feature (24)..(25): 2'-O-Methyl
  misc_feature (27)..(33): 2'-O-Methyl
  misc_feature (34)..(34): n stands for inverted deoxyabasic derivative
ugaguagccgaaaggcgagugaggucuaccggan

SEQ ID NO: 16062 - RNA, 34 nt, Artificial Sequence
  Description of Artificial Sequence:  Nucleic Acid
  misc_feature (1)..(4): phosphorothioate linkage
  misc_feature (16)..(16): 2'-deoxy-2'-amino derivative
  misc_feature (26)..(26): 2'-deoxy-2'-amino derivative
  misc_feature (1)..(15): 2'-O-Methyl
  misc_feature (17)..(22): 2'-O-Methyl
  misc_feature (24)..(25): 2'-O-Methyl
  misc_feature (27)..(33): 2'-O-Methyl
  misc_feature (34)..(34): n stands for inverted deoxyabasic derivative
aguacagccgaaaggcgagugaggucucggaaun

SEQ ID NO: 16063 - RNA, 34 nt, Artificial Sequence
  Description of Artificial Sequence:  Nucleic Acid
  misc_feature (1)..(4): phosphorothioate linkage
  misc_feature (16)..(16): 2'-deoxy-2'-amino derivative
  misc_feature (26)..(26): 2'-deoxy-2'-amino derivative
  misc_feature (1)..(15): 2'-O-Methyl
  misc_feature (17)..(22): 2'-O-Methyl
  misc_feature (24)..(25): 2'-O-Methyl
  misc_feature (27)..(33): 2'-O-Methyl
  misc_feature (34)..(34): n stands for inverted deoxyabasic derivative
ggagaggccgaaaggcgagugaggucucauagun

SEQ ID NO: 16064 - RNA, 34 nt, Artificial Sequence
  Description of Artificial Sequence:  Nucleic Acid
  misc_feature (1)..(4): phosphorothioate linkage
  misc_feature (16)..(16): 2'-deoxy-2'-amino derivative
  misc_feature (26)..(26): 2'-deoxy-2'-amino derivative
  misc_feature (1)..(15): 2'-O-Methyl
  misc_feature (17)..(22): 2'-O-Methyl
  misc_feature (24)..(25): 2'-O-Methyl
  misc_feature (27)..(33): 2'-O-Methyl
  misc_feature (34)..(34): n stands for inverted deoxyabasic derivative
gcggaagccgaaaggcgagugaggucucggugan

SEQ ID NO: 16065 - RNA, 34 nt, Artificial Sequence
  Description of Artificial Sequence:  Nucleic Acid
  misc_feature (1)..(4): phosphorothioate linkage
  misc_feature (16)..(16): 2'-deoxy-2'-amino derivative
  misc_feature (26)..(26): 2'-deoxy-2'-amino derivative
  misc_feature (1)..(15): 2'-O-Methyl
  misc_feature (17)..(22): 2'-O-Methyl
  misc_feature (24)..(25): 2'-O-Methyl
  misc_feature (27)..(33): 2'-O-Methyl
  misc_feature (34)..(34): n stands for inverted deoxyabasic derivative
ggcguggccgaaaggcgagugaggucuccccgcn

SEQ ID NO: 16066 - RNA, 34 nt, Artificial Sequence
  Description of Artificial Sequence:  Nucleic Acid
  misc_feature (1)..(4): phosphorothioate linkage
  misc_feature (16)..(16): 2'-deoxy-2'-amino derivative
  misc_feature (26)..(26): 2'-deoxy-2'-amino derivative
  misc_feature (1)..(15): 2'-O-Methyl
  misc_feature (17)..(22): 2'-O-Methyl
  misc_feature (24)..(25): 2'-O-Methyl
  misc_feature (27)..(33): 2'-O-Methyl
  misc_feature (34)..(34): n stands for inverted deoxyabasic derivative
gaaagggccgaaaggcgagugaggucucuugugn

SEQ ID NO: 16067 - RNA, 34 nt, Artificial Sequence
  Description of Artificial Sequence:  Nucleic Acid
  misc_feature (1)..(4): phosphorothioate linkage
  misc_feature (16)..(16): 2'-deoxy-2'-amino derivative
  misc_feature (26)..(26): 2'-deoxy-2'-amino derivative
  misc_feature (1)..(15): 2'-O-Methyl
  misc_feature (17)..(22): 2'-O-Methyl
  misc_feature (24)..(25): 2'-O-Methyl
  misc_feature (27)..(33): 2'-O-Methyl
  misc_feature (34)..(34): n stands for inverted deoxyabasic derivative
ggucuggccgaaaggcgagugaggucuggaaccn

SEQ ID NO: 16068 - RNA, 34 nt, Artificial Sequence
  Description of Artificial Sequence:  Nucleic Acid
  misc_feature (1)..(4): phosphorothioate linkage
  misc_feature (16)..(16): 2'-deoxy-2'-amino derivative
  misc_feature (26)..(26): 2'-deoxy-2'-amino derivative
  misc_feature (1)..(15): 2'-O-Methyl
  misc_feature (17)..(22): 2'-O-Methyl
  misc_feature (24)..(25): 2'-O-Methyl
  misc_feature (27)..(33): 2'-O-Methyl
  misc_feature (34)..(34): n stands for inverted deoxyabasic derivative
guacuggccgaaaggcgagugaggucucugauan

SEQ ID NO: 16069 - RNA, 34 nt, Artificial Sequence
  Description of Artificial Sequence:  Nucleic Acid
  misc_feature (1)..(4): phosphorothioate linkage
  misc_feature (16)..(16): 2'-deoxy-2'-amino derivative
  misc_feature (26)..(26): 2'-deoxy-2'-amino derivative
  misc_feature (1)..(15): 2'-O-Methyl
  misc_feature (17)..(22): 2'-O-Methyl
  misc_feature (24)..(25): 2'-O-Methyl
  misc_feature (27)..(33): 2'-O-Methyl
  misc_feature (34)..(34): n stands for inverted deoxyabasic derivative
gugguagccgaaaggcgagugaggucuugccugn

SEQ ID NO: 16070 - RNA, 36 nt, Artificial Sequence
  Description of Artificial Sequence:  Nucleic Acid
  misc_feature (1)..(4): phosphorothioate linkage
  misc_feature (17)..(17): 2'-deoxy-2'-amino derivative
  misc_feature (27)..(27): 2'-deoxy-2'-amino derivative
  misc_feature (1)..(16): 2'-O-Methyl
  misc_feature (18)..(23): 2'-O-Methyl
  misc_feature (25)..(26): 2'-O-Methyl
  misc_feature (28)..(35): 2'-O-Methyl
  misc_feature (36)..(36): n stands for inverted deoxyabasic derivative
gugaguagccgaaaggcgagugaggucuaccggaan

SEQ ID NO: 16071 - RNA, 36 nt, Artificial Sequence
  Description of Artificial Sequence:  Nucleic Acid
  misc_feature (1)..(4): phosphorothioate linkage
  misc_feature (17)..(17): 2'-deoxy-2'-amino derivative
  misc_feature (27)..(27): 2'-deoxy-2'-amino derivative
  misc_feature (1)..(16): 2'-O-Methyl
  misc_feature (18)..(23): 2'-O-Methyl
  misc_feature (25)..(26): 2'-O-Methyl
  misc_feature (28)..(35): 2'-O-Methyl
  misc_feature (36)..(36): n stands for inverted deoxyabasic derivative
cgaaagggccgaaaggcgagugaggucucuuguggn

SEQ ID NO: 16072 - RNA, 36 nt, Artificial Sequence
  Description of Artificial Sequence:  Nucleic Acid
  misc_feature (1)..(4): phosphorothioate linkage
  misc_feature (17)..(17): 2'-deoxy-2'-amino derivative
  misc_feature (27)..(27): 2'-deoxy-2'-amino derivative
  misc_feature (1)..(16): 2'-O-Methyl
  misc_feature (18)..(23): 2'-O-Methyl
  misc_feature (25)..(26): 2'-O-Methyl
  misc_feature (28)..(35): 2'-O-Methyl
  misc_feature (36)..(36): n stands for inverted deoxyabasic derivative
ugcggaagccgaaaggcgagugaggucucggugagn

SEQ ID NO: 16073 - RNA, 36 nt, Artificial Sequence
  Description of Artificial Sequence:  Nucleic Acid
  misc_feature (1)..(4): phosphorothioate linkage
  misc_feature (17)..(17): 2'-deoxy-2'-amino derivative
  misc_feature (27)..(27): 2'-deoxy-2'-amino derivative
  misc_feature (1)..(16): 2'-O-Methyl
  misc_feature (18)..(23): 2'-O-Methyl
  misc_feature (25)..(26): 2'-O-Methyl
  misc_feature (28)..(35): 2'-O-Methyl
  misc_feature (36)..(36): n stands for inverted deoxyabasic derivative
gggagaggccgaaaggcgagugaggucucauagugn

SEQ ID NO: 16074 - RNA, 36 nt, Artificial Sequence
  Description of Artificial Sequence:  Nucleic Acid
  misc_feature (1)..(4): phosphorothioate linkage
  misc_feature (17)..(17): 2'-deoxy-2'-amino derivative
  misc_feature (27)..(27): 2'-deoxy-2'-amino derivative
  misc_feature (1)..(16): 2'-O-Methyl
  misc_feature (18)..(23): 2'-O-Methyl
  misc_feature (25)..(26): 2'-O-Methyl
  misc_feature (28)..(35): 2'-O-Methyl
  misc_feature (36)..(36): n stands for inverted deoxyabasic derivative
uggucuggccgaaaggcgagugaggucuggaaccgn

SEQ ID NO: 16075 - RNA, 36 nt, Artificial Sequence
  Description of Artificial Sequence:  Nucleic Acid
  misc_feature (1)..(4): phosphorothioate linkage
  misc_feature (17)..(17): 2'-deoxy-2'-amino derivative
  misc_feature (27)..(27): 2'-deoxy-2'-amino derivative
  misc_feature (1)..(16): 2'-O-Methyl
  misc_feature (18)..(23): 2'-O-Methyl
  misc_feature (25)..(26): 2'-O-Methyl
  misc_feature (28)..(35): 2'-O-Methyl
  misc_feature (36)..(36): n stands for inverted deoxyabasic derivative
gguacuggccgaaaggcgagugaggucucugauagn

SEQ ID NO: 16076 - RNA, 36 nt, Artificial Sequence
  Description of Artificial Sequence:  Nucleic Acid
  misc_feature (1)..(4): phosphorothioate linkage
  misc_feature (17)..(17): 2'-deoxy-2'-amino derivative
  misc_feature (27)..(27): 2'-deoxy-2'-amino derivative
  misc_feature (1)..(16): 2'-O-Methyl
  misc_feature (18)..(23): 2'-O-Methyl
  misc_feature (25)..(26): 2'-O-Methyl
  misc_feature (28)..(35): 2'-O-Methyl
  misc_feature (36)..(36): n stands for inverted deoxyabasic derivative
ugugguagccgaaaggcgagugaggucuugccugan

SEQ ID NO: 16077 - RNA, 36 nt, Artificial Sequence
  Description of Artificial Sequence:  Nucleic Acid
  misc_feature (1)..(4): phosphorothioate linkage
  misc_feature (17)..(17): 2'-deoxy-2'-amino derivative
  misc_feature (27)..(27): 2'-deoxy-2'-amino derivative
  misc_feature (1)..(16): 2'-O-Methyl
  misc_feature (18)..(23): 2'-O-Methyl
  misc_feature (25)..(26): 2'-O-Methyl
  misc_feature (28)..(35): 2'-O-Methyl
  misc_feature (36)..(36): n stands for inverted deoxyabasic derivative
gaguacagccgaaaggcgagugaggucucggaauun

SEQ ID NO: 16078 - RNA, 35 nt, Artificial Sequence
  Description of Artificial Sequence:  Nucleic Acid
  misc_feature (1)..(4): phosphorothioate linkage
  misc_feature (8)..(8): 2'-deoxy-2'-amino derivative
  misc_feature (11)..(11): 2'-deoxy-2'-amino derivative
  misc_feature (29)..(29): 2'-deoxy-2'-amino derivative
  misc_feature (1)..(7): 2'-O-Methyl
  misc_feature (13)..(25): 2'-O-Methyl
  misc_feature (27)..(28): 2'-O-Methyl
  misc_feature (30)..(34): 2'-O-Methyl
  misc_feature (35)..(35): n stands for inverted deoxyabasic derivative
cggugacugaugaggccguuaggccgaauacaccn

SEQ ID NO: 16079 - RNA, 35 nt, Artificial Sequence
  Description of Artificial Sequence:  Nucleic Acid
  misc_feature (1)..(4): phosphorothioate linkage
  misc_feature (8)..(8): 2'-deoxy-2'-amino derivative
  misc_feature (11)..(11): 2'-deoxy-2'-amino derivative
  misc_feature (29)..(29): 2'-deoxy-2'-amino derivative
  misc_feature (1)..(7): 2'-O-Methyl
  misc_feature (13)..(25): 2'-O-Methyl
  misc_feature (27)..(28): 2'-O-Methyl
  misc_feature (30)..(34): 2'-O-Methyl
  misc_feature (35)..(35): n stands for inverted deoxyabasic derivative
gaaccgcugaugaggccguuaggccgaaugaguan

SEQ ID NO: 16080 - RNA, 35 nt, Artificial Sequence
  Description of Artificial Sequence:  Nucleic Acid
  misc_feature (1)..(4): phosphorothioate linkage
  misc_feature (8)..(8): 2'-deoxy-2'-amino derivative
  misc_feature (11)..(11): 2'-deoxy-2'-amino derivative
  misc_feature (29)..(29): 2'-deoxy-2'-amino derivative
  misc_feature (1)..(7): 2'-O-Methyl
  misc_feature (13)..(25): 2'-O-Methyl
  misc_feature (27)..(28): 2'-O-Methyl
  misc_feature (30)..(34): 2'-O-Methyl
  misc_feature (35)..(35): n stands for inverted deoxyabasic derivative
agagcccugaugaggccguuaggccgaauaguggn

SEQ ID NO: 16081 - RNA, 35 nt, Artificial Sequence
  Description of Artificial Sequence:  Nucleic Acid
  misc_feature (1)..(4): phosphorothioate linkage
  misc_feature (8)..(8): 2'-deoxy-2'-amino derivative
  misc_feature (11)..(11): 2'-deoxy-2'-amino derivative
  misc_feature (29)..(29): 2'-deoxy-2'-amino derivative
  misc_feature (1)..(7): 2'-O-Methyl
  misc_feature (13)..(25): 2'-O-Methyl
  misc_feature (27)..(28): 2'-O-Methyl
  misc_feature (30)..(34): 2'-O-Methyl
  misc_feature (35)..(35): n stands for inverted deoxyabasic derivative
aaggcccugaugaggccguuaggccgaauguggun

SEQ ID NO: 16082 - RNA, 35 nt, Artificial Sequence
  Description of Artificial Sequence:  Nucleic Acid
  misc_feature (1)..(4): phosphorothioate linkage
  misc_feature (8)..(8): 2'-deoxy-2'-amino derivative
  misc_feature (11)..(11): 2'-deoxy-2'-amino derivative
  misc_feature (29)..(29): 2'-deoxy-2'-amino derivative
  misc_feature (1)..(7): 2'-O-Methyl
  misc_feature (13)..(25): 2'-O-Methyl
  misc_feature (27)..(28): 2'-O-Methyl
  misc_feature (30)..(34): 2'-O-Methyl
  misc_feature (35)..(35): n stands for inverted deoxyabasic derivative
uugggccugaugaggccguuaggccgaaugccccn

SEQ ID NO: 16083 - RNA, 35 nt, Artificial Sequence
  Description of Artificial Sequence:  Nucleic Acid
  misc_feature (1)..(4): phosphorothioate linkage
  misc_feature (8)..(8): 2'-deoxy-2'-amino derivative
  misc_feature (11)..(11): 2'-deoxy-2'-amino derivative
  misc_feature (29)..(29): 2'-deoxy-2'-amino derivative
  misc_feature (1)..(7): 2'-O-Methyl
  misc_feature (13)..(25): 2'-O-Methyl
  misc_feature (27)..(28): 2'-O-Methyl
  misc_feature (30)..(34): 2'-O-Methyl
  misc_feature (35)..(35): n stands for inverted deoxyabasic derivative
gccauacugaugaggccguuaggccgaauggucun

SEQ ID NO: 16084 - RNA, 35 nt, Artificial Sequence
  Description of Artificial Sequence:  Nucleic Acid
  misc_feature (1)..(4): phosphorothioate linkage
  misc_feature (8)..(8): 2'-deoxy-2'-amino derivative
  misc_feature (11)..(11): 2'-deoxy-2'-amino derivative
  misc_feature (29)..(29): 2'-deoxy-2'-amino derivative
  misc_feature (1)..(7): 2'-O-Methyl
  misc_feature (13)..(25): 2'-O-Methyl
  misc_feature (27)..(28): 2'-O-Methyl
  misc_feature (30)..(34): 2'-O-Methyl
  misc_feature (35)..(35): n stands for inverted deoxyabasic derivative
auagugcugaugaggccguuaggccgaaucugcgn

SEQ ID NO: 16085 - RNA, 35 nt, Artificial Sequence
  Description of Artificial Sequence:  Nucleic Acid
  misc_feature (1)..(4): phosphorothioate linkage
  misc_feature (8)..(8): 2'-deoxy-2'-amino derivative
  misc_feature (11)..(11): 2'-deoxy-2'-amino derivative
  misc_feature (29)..(11): 2'-deoxy-2'-amino derivative
  misc_feature (1)..(7): 2'-O-Methyl
  misc_feature (13)..(25): 2'-O-Methyl
  misc_feature (27)..(28): 2'-O-Methyl
  misc_feature (30)..(34): 2'-O-Methyl
  misc_feature (35)..(35): n stands for inverted deoxyabasic derivative
gguccucugaugaggccguuaggccgaaucuuggn

SEQ ID NO: 16086 - RNA, 35 nt, Artificial Sequence
  Description of Artificial Sequence:  Nucleic Acid
  misc_feature (1)..(4): phosphorothioate linkage
  misc_feature (8)..(8): 2'-deoxy-2'-amino derivative
  misc_feature (11)..(11): 2'-deoxy-2'-amino derivative
  misc_feature (29)..(29): 2'-deoxy-2'-amino derivative
  misc_feature (1)..(7): 2'-O-Methyl
  misc_feature (13)..(25): 2'-O-Methyl
  misc_feature (27)..(28): 2'-O-Methyl
  misc_feature (30)..(34): 2'-O-Methyl
  misc_feature (35)..(35): n stands for inverted deoxyabasic derivative
gggucccugaugaggccguuaggccgaauucuugn

SEQ ID NO: 16087 - RNA, 35 nt, Artificial Sequence
  Description of Artificial Sequence:  Nucleic Acid
  misc_feature (1)..(4): phosphorothioate linkage
  misc_feature (8)..(8): 2'-deoxy-2'-amino derivative
  misc_feature (11)..(11): 2'-deoxy-2'-amino derivative
  misc_feature (29)..(29): 2'-deoxy-2'-amino derivative
  misc_feature (1)..(7): 2'-O-Methyl
  misc_feature (13)..(25): 2'-O-Methyl
  misc_feature (27)..(28): 2'-O-Methyl
  misc_feature (30)..(34): 2'-O-Methyl
  misc_feature (35)..(35): n stands for inverted deoxyabasic derivative
ggccuucugaugaggccguuaggccgaaugguacn

SEQ ID NO: 16088 - RNA, 35 nt, Artificial Sequence
  Description of Artificial Sequence:  Nucleic Acid
  misc_feature (1)..(4): phosphorothioate linkage
  misc_feature (8)..(8): 2'-deoxy-2'-amino derivative
  misc_feature (11)..(11): 2'-deoxy-2'-amino derivative
  misc_feature (29)..(29): 2'-deoxy-2'-amino derivative
  misc_feature (1)..(7): 2'-O-Methyl
  misc_feature (13)..(25): 2'-O-Methyl
  misc_feature (27)..(28): 2'-O-Methyl
  misc_feature (30)..(34): 2'-O-Methyl
  misc_feature (35)..(35): n stands for inverted deoxyabasic derivative
cuugugcugaugaggccguuaggccgaauacugcn

SEQ ID NO: 16089 - RNA, 35 nt, Artificial Sequence
  Description of Artificial Sequence:  Nucleic Acid
  misc_feature (1)..(4): phosphorothioate linkage
  misc_feature (8)..(8): 2'-deoxy-2'-amino derivative
  misc_feature (11)..(11): 2'-deoxy-2'-amino derivative
  misc_feature (29)..(29): 2'-deoxy-2'-amino derivative
  misc_feature (1)..(7): 2'-O-Methyl
  misc_feature (13)..(25): 2'-O-Methyl
  misc_feature (27)..(28): 2'-O-Methyl
  misc_feature (30)..(34): 2'-O-Methyl
  misc_feature (35)..(35): n stands for inverted deoxyabasic derivative
ugccugcugaugaggccguuaggccgaauagggun

SEQ ID NO: 16090 - RNA, 35 nt, Artificial Sequence
  Description of Artificial Sequence:  Nucleic Acid
  misc_feature (1)..(4): phosphorothioate linkage
  misc_feature (8)..(8): 2'-deoxy-2'-amino derivative
  misc_feature (11)..(11): 2'-deoxy-2'-amino derivative
  misc_feature (29)..(29): 2'-deoxy-2'-amino derivative
  misc_feature (1)..(7): 2'-O-Methyl
  misc_feature (13)..(25): 2'-O-Methyl
  misc_feature (27)..(28): 2'-O-Methyl
  misc_feature (30)..(34): 2'-O-Methyl
  misc_feature (35)..(35): n stands for inverted deoxyabasic derivative
gaccggcugaugaggccguuaggccgaauccuuun

SEQ ID NO: 16091 - RNA, 37 nt, Artificial Sequence
  Description of Artificial Sequence:  Nucleic Acid
  misc_feature (1)..(4): phosphorothioate linkage
  misc_feature (9)..(9): 2'-deoxy-2'-amino derivative
  misc_feature (12)..(12): 2'-deoxy-2'-amino derivative
  misc_feature (30)..(30): 2'-deoxy-2'-amino derivative
  misc_feature (1)..(8): 2'-O-Methyl
  misc_feature (14)..(26): 2'-O-Methyl
  misc_feature (28)..(29): 2'-O-Methyl
  misc_feature (31)..(36): 2'-O-Methyl
  misc_feature (37)..(37): n stands for inverted deoxyabasic derivative
ccggugacugaugaggccguuaggccgaauacaccgn

SEQ ID NO: 16092 - RNA, 37 nt, Artificial Sequence
  Description of Artificial Sequence:  Nucleic Acid
  misc_feature (1)..(4): phosphorothioate linkage
  misc_feature (9)..(9): 2'-deoxy-2'-amino derivative
  misc_feature (12)..(12): 2'-deoxy-2'-amino derivative
  misc_feature (30)..(30): 2'-deoxy-2'-amino derivative
  misc_feature (1)..(8): 2'-O-Methyl
  misc_feature (14)..(26): 2'-O-Methyl
  misc_feature (28)..(29): 2'-O-Methyl
  misc_feature (31)..(36): 2'-O-Methyl
  misc_feature (37)..(37): n stands for inverted deoxyabasic derivative
gagagcccugaugaggccguuaggccgaauaguggun

SEQ ID NO: 16093 - RNA, 37 nt, Artificial Sequence
  Description of Artificial Sequence:  Nucleic Acid
  misc_feature (1)..(4): phosphorothioate linkage
  misc_feature (9)..(9): 2'-deoxy-2'-amino derivative
  misc_feature (12)..(12): 2'-deoxy-2'-amino derivative
  misc_feature (30)..(30): 2'-deoxy-2'-amino derivative
  misc_feature (1)..(8): 2'-O-Methyl
  misc_feature (14)..(26): 2'-O-Methyl
  misc_feature (28)..(29): 2'-O-Methyl
  misc_feature (31)..(36): 2'-O-Methyl
  misc_feature (37)..(37): n stands for inverted deoxyabasic derivative
ggaaccgcugaugaggccguuaggccgaaugaguacn

SEQ ID NO: 16094 - RNA, 37 nt, Artificial Sequence
  Description of Artificial Sequence:  Nucleic Acid
  misc_feature (1)..(4): phosphorothioate linkage
  misc_feature (9)..(9): 2'-deoxy-2'-amino derivative
  misc_feature (12)..(12): 2'-deoxy-2'-amino derivative
  misc_feature (30)..(30): 2'-deoxy-2'-amino derivative
  misc_feature (1)..(8): 2'-O-Methyl
  misc_feature (14)..(26): 2'-O-Methyl
  misc_feature (28)..(29): 2'-O-Methyl
  misc_feature (31)..(36): 2'-O-Methyl
  misc_feature (37)..(37): n stands for inverted deoxyabasic derivative
uuugggccugaugaggccguuaggccgaaugcccccn

SEQ ID NO: 16095 - RNA, 37 nt, Artificial Sequence
  Description of Artificial Sequence:  Nucleic Acid
  misc_feature (1)..(4): phosphorothioate linkage
  misc_feature (9)..(9): 2'-deoxy-2'-amino derivative
  misc_feature (12)..(12): 2'-deoxy-2'-amino derivative
  misc_feature (30)..(30): 2'-deoxy-2'-amino derivative
  misc_feature (1)..(8): 2'-O-Methyl
  misc_feature (14)..(26): 2'-O-Methyl
  misc_feature (28)..(29): 2'-O-Methyl
  misc_feature (31)..(36): 2'-O-Methyl
  misc_feature (37)..(37): n stands for inverted deoxyabasic derivative
agccauacugaugaggccguuaggccgaauggucugn

SEQ ID NO: 16096 - RNA, 37 nt, Artificial Sequence
  Description of Artificial Sequence:  Nucleic Acid
  misc_feature (1)..(4): phosphorothioate linkage
  misc_feature (9)..(9): 2'-deoxy-2'-amino derivative
  misc_feature (12)..(12): 2'-deoxy-2'-amino derivative
  misc_feature (30)..(30): 2'-deoxy-2'-amino derivative
  misc_feature (1)..(8): 2'-O-Methyl
  misc_feature (14)..(26): 2'-O-Methyl
  misc_feature (28)..(29): 2'-O-Methyl
  misc_feature (31)..(36): 2'-O-Methyl
  misc_feature (37)..(37): n stands for inverted deoxyabasic derivative
cauagugcugaugaggccguuaggccgaaucugcggn

SEQ ID NO: 16097 - RNA, 37 nt, Artificial Sequence
  Description of Artificial Sequence:  Nucleic Acid
  misc_feature (1)..(4): phosphorothioate linkage
  misc_feature (9)..(9): 2'-deoxy-2'-amino derivative
  misc_feature (12)..(12): 2'-deoxy-2'-amino derivative
  misc_feature (30)..(30): 2'-deoxy-2'-amino derivative
  misc_feature (1)..(8): 2'-O-Methyl
  misc_feature (14)..(26): 2'-O-Methyl
  misc_feature (28)..(29): 2'-O-Methyl
  misc_feature (31)..(36): 2'-O-Methyl
  misc_feature (37)..(37): n stands for inverted deoxyabasic derivative
ggguccucugaugaggccguuaggccgaaucuuggan

SEQ ID NO: 16098 - RNA, 37 nt, Artificial Sequence
  Description of Artificial Sequence:  Nucleic Acid
  misc_feature (1)..(4): phosphorothioate linkage
  misc_feature (9)..(9): 2'-deoxy-2'-amino derivative
  misc_feature (12)..(12): 2'-deoxy-2'-amino derivative
  misc_feature (30)..(30): 2'-deoxy-2'-amino derivative
  misc_feature (1)..(8): 2'-O-Methyl
  misc_feature (14)..(26): 2'-O-Methyl
  misc_feature (28)..(29): 2'-O-Methyl
  misc_feature (31)..(36): 2'-O-Methyl
  misc_feature (37)..(37): n stands for inverted deoxyabasic derivative
aggccuucugaugaggccguuaggccgaaugguacun

SEQ ID NO: 16099 - RNA, 37 nt, Artificial Sequence
  Description of Artificial Sequence:  Nucleic Acid
  misc_feature (1)..(4): phosphorothioate linkage
  misc_feature (9)..(9): 2'-deoxy-2'-amino derivative
  misc_feature (12)..(12): 2'-deoxy-2'-amino derivative
  misc_feature (30)..(30): 2'-deoxy-2'-amino derivative
  misc_feature (1)..(8): 2'-O-Methyl
  misc_feature (14)..(26): 2'-O-Methyl
  misc_feature (28)..(29): 2'-O-Methyl
  misc_feature (36)..(29): 2'-O-Methyl
  misc_feature (37)..(37): n stands for inverted deoxyabasic derivative
aaaggcccugaugaggccguuaggccgaaugugguan

SEQ ID NO: 16100 - RNA, 37 nt, Artificial Sequence
  Description of Artificial Sequence:  Nucleic Acid
  misc_feature (1)..(4): phosphorothioate linkage
  misc_feature (9)..(9): 2'-deoxy-2'-amino derivative
  misc_feature (12)..(12): 2'-deoxy-2'-amino derivative
  misc_feature (30)..(30): 2'-deoxy-2'-amino derivative
  misc_feature (1)..(8): 2'-O-Methyl
  misc_feature (14)..(26): 2'-O-Methyl
  misc_feature (28)..(29): 2'-O-Methyl
  misc_feature (31)..(36): 2'-O-Methyl
  misc_feature (37)..(37): n stands for inverted deoxyabasic derivative
cugccugcugaugaggccguuaggccgaauagggugn

SEQ ID NO: 16101 - RNA, 37 nt, Artificial Sequence
  Description of Artificial Sequence:  Nucleic Acid
  misc_feature (1)..(4): phosphorothioate linkage
  misc_feature (9)..(9): 2'-deoxy-2'-amino derivative
  misc_feature (12)..(12): 2'-deoxy-2'-amino derivative
  misc_feature (30)..(30): 2'-deoxy-2'-amino derivative
  misc_feature (1)..(8): 2'-O-Methyl
  misc_feature (14)..(26): 2'-O-Methyl
  misc_feature (28)..(29): 2'-O-Methyl
  misc_feature (31)..(36): 2'-O-Methyl
  misc_feature (37)..(37): n stands for inverted deoxyabasic derivative
ccuugugcugaugaggccguuaggccgaauacugccn

SEQ ID NO: 16102 - RNA, 36 nt, Artificial Sequence
  Description of Artificial Sequence:  Nucleic Acid
  misc_feature (36)..(36): n stands for inverted deoxyabasic derivative
  misc_feature (1)..(8): 2'-O-Methyl
  misc_feature (12)..(16): 2'-O-Methyl
  misc_feature (18)..(26): 2'-O-Methyl
  misc_feature (28)..(35): 2'-O-Methyl
uggaagaugauggcaugcacuaugcgcgacugagan

SEQ ID NO: 16103 - RNA, 36 nt, Artificial Sequence
  Description of Artificial Sequence:  Nucleic Acid
  misc_feature (36)..(36): n stands for inverted deoxyabasic derivative
  misc_feature (1)..(8): 2'-O-Methyl
  misc_feature (12)..(16): 2'-O-Methyl
  misc_feature (18)..(26): 2'-O-Methyl
  misc_feature (28)..(35): 2'-O-Methyl
ggagaggugauggcaugcacuaugcgcgauauacan

SEQ ID NO: 16104 - RNA, 36 nt, Artificial Sequence
  Description of Artificial Sequence:  Nucleic Acid
  misc_feature (36)..(36): n stands for inverted deoxyabasic derivative
  misc_feature (1)..(8): 2'-O-Methyl
  misc_feature (12)..(16): 2'-O-Methyl
  misc_feature (18)..(26): 2'-O-Methyl
  misc_feature (28)..(35): 2'-O-Methyl
ucuaaggugauggcaugcacuaugcgcgacacggun

SEQ ID NO: 16105 - RNA, 36 nt, Artificial Sequence
  Description of Artificial Sequence:  Nucleic Acid
  misc_feature (36)..(36): n stands for inverted deoxyabasic derivative
  misc_feature (1)..(8): 2'-O-Methyl
  misc_feature (12)..(16): 2'-O-Methyl
  misc_feature (18)..(26): 2'-O-Methyl
  misc_feature (28)..(35): 2'-O-Methyl
accaccuugauggcaugcacuaugcgcgacuccacn

SEQ ID NO: 16106 - RNA, 36 nt, Artificial Sequence
  Description of Artificial Sequence:  Nucleic Acid
  misc_feature (36)..(36): n stands for inverted deoxyabasic derivative
  misc_feature (1)..(8): 2'-O-Methyl
  misc_feature (12)..(16): 2'-O-Methyl
  misc_feature (18)..(26): 2'-O-Methyl
  misc_feature (28)..(35): 2'-O-Methyl
acagguuugauggcaugcacuaugcgcgaacucgun

SEQ ID NO: 16107 - RNA, 36 nt, Artificial Sequence
  Description of Artificial Sequence:  Nucleic Acid
  misc_feature (36)..(36): n stands for inverted deoxyabasic derivative
  misc_feature (1)..(8): 2'-O-Methyl
  misc_feature (12)..(16): 2'-O-Methyl
  misc_feature (18)..(26): 2'-O-Methyl
  misc_feature (28)..(35): 2'-O-Methyl
ggaugguugauggcaugcacuaugcgcgagacaggn

SEQ ID NO: 16108 - RNA, 36 nt, Artificial Sequence
  Description of Artificial Sequence:  Nucleic Acid
  misc_feature (36)..(36): n stands for inverted deoxyabasic derivative
  misc_feature (1)..(8): 2'-O-Methyl
  misc_feature (12)..(16): 2'-O-Methyl
  misc_feature (18)..(26): 2'-O-Methyl
  misc_feature (28)..(35): 2'-O-Methyl
ggaaaagugauggcaugcacuaugcgcgaacaggan

SEQ ID NO: 16109 - RNA, 36 nt, Artificial Sequence
  Description of Artificial Sequence:  Nucleic Acid
  misc_feature (36)..(36): n stands for inverted deoxyabasic derivative
  misc_feature (1)..(8): 2'-O-Methyl
  misc_feature (12)..(16): 2'-O-Methyl
  misc_feature (18)..(26): 2'-O-Methyl
  misc_feature (28)..(35): 2'-O-Methyl
agaagaaugauggcaugcacuaugcgcgacgaggan

SEQ ID NO: 16110 - RNA, 36 nt, Artificial Sequence
  Description of Artificial Sequence:  Nucleic Acid
  misc_feature (36)..(36): n stands for inverted deoxyabasic derivative
  misc_feature (1)..(8): 2'-O-Methyl
  misc_feature (12)..(16): 2'-O-Methyl
  misc_feature (18)..(26): 2'-O-Methyl
  misc_feature (28)..(35): 2'-O-Methyl
ggacgagugauggcaugcacuaugcgcgacuuugun

SEQ ID NO: 16111 - RNA, 36 nt, Artificial Sequence
  Description of Artificial Sequence:  Nucleic Acid
  misc_feature (36)..(36): n stands for inverted deoxyabasic derivative
  misc_feature (1)..(8): 2'-O-Methyl
  misc_feature (12)..(16): 2'-O-Methyl
  misc_feature (18)..(26): 2'-O-Methyl
  misc_feature (28)..(35): 2'-O-Methyl
gguagguugauggcaugcacuaugcgcgaaguggcn

SEQ ID NO: 16112 - RNA, 36 nt, Artificial Sequence
  Description of Artificial Sequence:  Nucleic Acid
  misc_feature (36)..(36): n stands for inverted deoxyabasic derivative
  misc_feature (17)..(17): 2'-deoxy-2'-amino derivative
  misc_feature (27)..(27): 2'-deoxy-2'-amino derivative
  misc_feature (1)..(16): 2'-O-Methyl
  misc_feature (18)..(23): 2'-O-Methyl
  misc_feature (26)..(26): 2'-O-Methyl
  misc_feature (28)..(35): 2'-O-Methyl
ugagagagccgaaaggcgagugaggucugaggaagn

SEQ ID NO: 16113 - RNA, 36 nt, Artificial Sequence
  Description of Artificial Sequence:  Nucleic Acid
  misc_feature (36)..(36): n stands for inverted deoxyabasic derivative
  misc_feature (17)..(17): 2'-deoxy-2'-amino derivative
  misc_feature (27)..(27): 2'-deoxy-2'-amino derivative
  misc_feature (1)..(16): 2'-O-Methyl
  misc_feature (18)..(23): 2'-O-Methyl
  misc_feature (26)..(26): 2'-O-Methyl
  misc_feature (28)..(35): 2'-O-Methyl
aggugaagccgaaaggcgagugaggucuagcugagn

SEQ ID NO: 16114 - RNA, 36 nt, Artificial Sequence
  Description of Artificial Sequence:  Nucleic Acid
  misc_feature (36)..(36): n stands for inverted deoxyabasic derivative
  misc_feature (17)..(17): 2'-deoxy-2'-amino derivative
  misc_feature (27)..(27): 2'-deoxy-2'-amino derivative
  misc_feature (1)..(16): 2'-O-Methyl
  misc_feature (18)..(23): 2'-O-Methyl
  misc_feature (26)..(26): 2'-O-Methyl
  misc_feature (28)..(35): 2'-O-Methyl
ggaaaaggccgaaaggcgagugaggucuaacaggan

SEQ ID NO: 16115 - RNA, 36 nt, Artificial Sequence
  Description of Artificial Sequence:  Nucleic Acid
  misc_feature (36)..(36): n stands for inverted deoxyabasic derivative
  misc_feature (17)..(27): 2'-deoxy-2'-amino derivative
  misc_feature (27)..(27): 2'-deoxy-2'-amino derivative
  misc_feature (1)..(16): 2'-O-Methyl
  misc_feature (18)..(23): 2'-O-Methyl
  misc_feature (26)..(26): 2'-O-Methyl
  misc_feature (28)..(35): 2'-O-Methyl
agaagaagccgaaaggcgagugaggucuacgaggan

SEQ ID NO: 16116 - RNA, 36 nt, Artificial Sequence
  Description of Artificial Sequence:  Nucleic Acid
  misc_feature (36)..(36): n stands for inverted deoxyabasic derivative
  misc_feature (17)..(17): 2'-deoxy-2'-amino derivative
  misc_feature (27)..(27): 2'-deoxy-2'-amino derivative
  misc_feature (1)..(16): 2'-O-Methyl
  misc_feature (18)..(23): 2'-O-Methyl
  misc_feature (26)..(26): 2'-O-Methyl
  misc_feature (28)..(35): 2'-O-Methyl
gaguugagccgaaaggcgagugaggucuuggagugn

SEQ ID NO: 16117 - RNA, 36 nt, Artificial Sequence
  Description of Artificial Sequence:  Nucleic Acid
  misc_feature (36)..(36): n stands for inverted deoxyabasic derivative
  misc_feature (17)..(17): 2'-deoxy-2'-amino derivative
  misc_feature (27)..(27): 2'-deoxy-2'-amino derivative
  misc_feature (1)..(16): 2'-O-Methyl
  misc_feature (18)..(23): 2'-O-Methyl
  misc_feature (26)..(26): 2'-O-Methyl
  misc_feature (28)..(35): 2'-O-Methyl
aagaggagccgaaaggcgagugaggucugcggcgan

SEQ ID NO: 16118 - RNA, 36 nt, Artificial Sequence
  Description of Artificial Sequence:  Nucleic Acid
  misc_feature (36)..(36): n stands for inverted deoxyabasic derivative
  misc_feature (17)..(17): 2'-deoxy-2'-amino derivative
  misc_feature (27)..(27): 2'-deoxy-2'-amino derivative
  misc_feature (1)..(16): 2'-O-Methyl
  misc_feature (18)..(23): 2'-O-Methyl
  misc_feature (26)..(26): 2'-O-Methyl
  misc_feature (28)..(35): 2'-O-Methyl
uggaagagccgaaaggcgagugaggucuacugagan

SEQ ID NO: 16119 - RNA, 36 nt, Artificial Sequence
  Description of Artificial Sequence:  Nucleic Acid
  misc_feature (36)..(36): n stands for inverted deoxyabasic derivative
  misc_feature (17)..(17): 2'-deoxy-2'-amino derivative
  misc_feature (27)..(27): 2'-deoxy-2'-amino derivative
  misc_feature (1)..(16): 2'-O-Methyl
  misc_feature (18)..(23): 2'-O-Methyl
  misc_feature (26)..(26): 2'-O-Methyl
  misc_feature (28)..(35): 2'-O-Methyl
aggaguagccgaaaggcgagugaggucuguggaggn

SEQ ID NO: 16120 - RNA, 36 nt, Artificial Sequence
  Description of Artificial Sequence:  Nucleic Acid
  misc_feature (36)..(36): n stands for inverted deoxyabasic derivative
  misc_feature (17)..(17): 2'-deoxy-2'-amino derivative
  misc_feature (27)..(27): 2'-deoxy-2'-amino derivative
  misc_feature (1)..(16): 2'-O-Methyl
  misc_feature (18)..(23): 2'-O-Methyl
  misc_feature (26)..(26): 2'-O-Methyl
  misc_feature (28)..(35): 2'-O-Methyl
cgaagcagccgaaaggcgagugaggucuauguggan

SEQ ID NO: 16121 - RNA, 36 nt, Artificial Sequence
  Description of Artificial Sequence:  Nucleic Acid
  misc_feature (36)..(36): n stands for inverted deoxyabasic derivative
  misc_feature (17)..(17): 2'-deoxy-2'-amino derivative
  misc_feature (27)..(27): 2'-deoxy-2'-amino derivative
  misc_feature (1)..(16): 2'-O-Methyl
  misc_feature (18)..(23): 2'-O-Methyl
  misc_feature (26)..(26): 2'-O-Methyl
  misc_feature (28)..(35): 2'-O-Methyl
uggaagagccgaaaggcgagugaggucuggcgugan

SEQ ID NO: 16122 - RNA, 37 nt, Artificial Sequence
  Description of Artificial Sequence:  Nucleic Acid
  misc_feature (37)..(37): n stands for inverted deoxyabasic derivative
  misc_feature (30)..(30): n is inosine
  misc_feature (1)..(7): 2'-O-Methyl
  misc_feature (15)..(26): 2'-O-Methyl
  misc_feature (31)..(36): 2'-O-Methyl
aagaggacugaugaggccguuaggccgaanauagagn

SEQ ID NO: 16123 - RNA, 37 nt, Artificial Sequence
  Description of Artificial Sequence:  Nucleic Acid
  misc_feature (37)..(37): n stands for inverted deoxyabasic derivative
  misc_feature (30)..(30): n is inosine
  misc_feature (1)..(7): 2'-O-Methyl
  misc_feature (15)..(26): 2'-O-Methyl
  misc_feature (31)..(36): 2'-O-Methyl
ggugaaccugaugaggccguuaggccgaancugagan

SEQ ID NO: 16124 - RNA, 37 nt, Artificial Sequence
  Description of Artificial Sequence:  Nucleic Acid
  misc_feature (37)..(37): n stands for inverted deoxyabasic derivative
  misc_feature (30)..(30): n is inosine
  misc_feature (1)..(7): 2'-O-Methyl
  misc_feature (15)..(26): 2'-O-Methyl
  misc_feature (31)..(36): 2'-O-Methyl
cgaggaacugaugaggccguuaggccgaanagaggan

SEQ ID NO: 16125 - RNA, 37 nt, Artificial Sequence
  Description of Artificial Sequence:  Nucleic Acid
  misc_feature (37)..(37): n stands for inverted deoxyabasic derivative
  misc_feature (30)..(30): n is inosine
  misc_feature (1)..(7): 2'-O-Methyl
  misc_feature (15)..(26): 2'-O-Methyl
  misc_feature (31)..(36): 2'-O-Methyl
ugauggacugaugaggccguuaggccgaancugugan

SEQ ID NO: 16126 - RNA, 37 nt, Artificial Sequence
  Description of Artificial Sequence:  Nucleic Acid
  misc_feature (37)..(37): n stands for inverted deoxyabasic derivative
  misc_feature (30)..(30): n is inosine
  misc_feature (1)..(7): 2'-O-Methyl
  misc_feature (15)..(26): 2'-O-Methyl
  misc_feature (31)..(36): 2'-O-Methyl
ugaggaacugaugaggccguuaggccgaanguggagn

SEQ ID NO: 16127 - RNA, 37 nt, Artificial Sequence
  Description of Artificial Sequence:  Nucleic Acid
  misc_feature (37)..(37): n stands for inverted deoxyabasic derivative
  misc_feature (30)..(30): n is inosine
  misc_feature (1)..(7): 2'-O-Methyl
  misc_feature (15)..(26): 2'-O-Methyl
  misc_feature (31)..(36): 2'-O-Methyl
gacacugcugaugaggccguuaggccgaanacaccan

SEQ ID NO: 16128 - RNA, 37 nt, Artificial Sequence
  Description of Artificial Sequence:  Nucleic Acid
  misc_feature (37)..(37): n stands for inverted deoxyabasic derivative
  misc_feature (30)..(30): n is inosine
  misc_feature (1)..(7): 2'-O-Methyl
  misc_feature (15)..(26): 2'-O-Methyl
  misc_feature (31)..(36): 2'-O-Methyl
gagaugacugaugaggccguuaggccgaangcgaagn

SEQ ID NO: 16129 - RNA, 37 nt, Artificial Sequence
  Description of Artificial Sequence:  Nucleic Acid
  misc_feature (37)..(37): n stands for inverted deoxyabasic derivative
  misc_feature (30)..(30): n is inosine
  misc_feature (1)..(7): 2'-O-Methyl
  misc_feature (15)..(26): 2'-O-Methyl
  misc_feature (31)..(36): 2'-O-Methyl
ggaugagcugaugaggccguuaggccgaanagaggun

SEQ ID NO: 16130 - RNA, 37 nt, Artificial Sequence
  Description of Artificial Sequence:  Nucleic Acid
  misc_feature (37)..(37): n stands for inverted deoxyabasic derivative
  misc_feature (30)..(30): n is inosine
  misc_feature (1)..(7): 2'-O-Methyl
  misc_feature (15)..(26): 2'-O-Methyl
  misc_feature (31)..(36): 2'-O-Methyl
ugugcagcugaugaggccguuaggccgaangaugaan

SEQ ID NO: 16131 - RNA, 37 nt, Artificial Sequence
  Description of Artificial Sequence:  Nucleic Acid
  misc_feature (37)..(37): n stands for inverted deoxyabasic derivative
  misc_feature (30)..(30): n is inosine
  misc_feature (1)..(7): 2'-O-Methyl
  misc_feature (15)..(26): 2'-O-Methyl
  misc_feature (31)..(36): 2'-O-Methyl
uggaugacugaugaggccguuaggccgaancuguugn

SEQ ID NO: 16132 - RNA, 37 nt, Artificial Sequence
  Description of Artificial Sequence:  Nucleic Acid
  misc_feature (37)..(37): n stands for inverted deoxyabasic derivative
  misc_feature (1)..(7): 2'-O-Methyl
  misc_feature (15)..(26): 2'-O-Methyl
  misc_feature (31)..(36): 2'-O-Methyl
gcugagacugaugaggccguuaggccgaaacgaggan

SEQ ID NO: 16133 - RNA, 37 nt, Artificial Sequence
  Description of Artificial Sequence:  Nucleic Acid
  misc_feature (37)..(37): n stands for inverted deoxyabasic derivative
  misc_feature (1)..(7): 2'-O-Methyl
  misc_feature (15)..(26): 2'-O-Methyl
  misc_feature (31)..(36): 2'-O-Methyl
uccuguucugaugaggccguuaggccgaaaugugccn

SEQ ID NO: 16134 - RNA, 37 nt, Artificial Sequence
  Description of Artificial Sequence:  Nucleic Acid
  misc_feature (37)..(37): n stands for inverted deoxyabasic derivative
  misc_feature (1)..(7): 2'-O-Methyl
  misc_feature (15)..(26): 2'-O-Methyl
  misc_feature (31)..(36): 2'-O-Methyl
ggaaggacugaugaggccguuaggccgaaaggaugcn

SEQ ID NO: 16135 - RNA, 37 nt, Artificial Sequence
  Description of Artificial Sequence:  Nucleic Acid
  misc_feature (37)..(37): n stands for inverted deoxyabasic derivative
  misc_feature (1)..(7): 2'-O-Methyl
  misc_feature (15)..(26): 2'-O-Methyl
  misc_feature (31)..(36): 2'-O-Methyl
cuccacgcugaugaggccguuaggccgaaacuccucn

SEQ ID NO: 16136 - RNA, 37 nt, Artificial Sequence
  Description of Artificial Sequence:  Nucleic Acid
  misc_feature (37)..(37): n stands for inverted deoxyabasic derivative
  misc_feature (1)..(7): 2'-O-Methyl
  misc_feature (15)..(26): 2'-O-Methyl
  misc_feature (31)..(36): 2'-O-Methyl
ggagugacugaugaggccguuaggccgaaaaugcgcn

SEQ ID NO: 16137 - RNA, 37 nt, Artificial Sequence
  Description of Artificial Sequence:  Nucleic Acid
  misc_feature (37)..(37): n stands for inverted deoxyabasic derivative
  misc_feature (1)..(7): 2'-O-Methyl
  misc_feature (15)..(26): 2'-O-Methyl
  misc_feature (31)..(36): 2'-O-Methyl
gcgagcccugaugaggccguuaggccgaaacgagucn

SEQ ID NO: 16138 - RNA, 37 nt, Artificial Sequence
  Description of Artificial Sequence:  Nucleic Acid
  misc_feature (37)..(37): n stands for inverted deoxyabasic derivative
  misc_feature (1)..(7): 2'-O-Methyl
  misc_feature (15)..(26): 2'-O-Methyl
  misc_feature (31)..(36): 2'-O-Methyl
gcuggaacugaugaggccguuaggccgaaacacugan

SEQ ID NO: 16139 - RNA, 37 nt, Artificial Sequence
  Description of Artificial Sequence:  Nucleic Acid
  misc_feature (37)..(37): n stands for inverted deoxyabasic derivative
  misc_feature (1)..(7): 2'-O-Methyl
  misc_feature (15)..(26): 2'-O-Methyl
  misc_feature (31)..(36): 2'-O-Methyl
aggaugacugaugaggccguuaggccgaaagagaggn

SEQ ID NO: 16140 - RNA, 37 nt, Artificial Sequence
  Description of Artificial Sequence:  Nucleic Acid
  misc_feature (37)..(37): n stands for inverted deoxyabasic derivative
  misc_feature (1)..(7): 2'-O-Methyl
  misc_feature (15)..(26): 2'-O-Methyl
  misc_feature (31)..(36): 2'-O-Methyl
ugaggagcugaugaggccguuaggccgaaacguggan

SEQ ID NO: 16141 - RNA, 37 nt, Artificial Sequence
  Description of Artificial Sequence:  Nucleic Acid
  misc_feature (37)..(37): n stands for inverted deoxyabasic derivative
  misc_feature (1)..(7): 2'-O-Methyl
  misc_feature (15)..(26): 2'-O-Methyl
  misc_feature (31)..(36): 2'-O-Methyl
gacuggacugaugaggccguuaggccgaaaugcacgn

SEQ ID NO: 16142 - DNA, 30 bp, Artificial Sequence
  misc_feature (30)..(30): n stands for inverted deoxyabasic derivative
  misc_feature (1)..(7): 2'-O-Methyl
  misc_feature (23)..(29): 2'-O-Methyl
aggaagaggctagctacaacgaagagaaan

SEQ ID NO: 16143 - DNA, 30 bp, Artificial Sequence
  Description of Artificial Sequence:  Nucleic Acid
  misc_feature (30)..(30): "n" is an inverted deoxyabasic moiety
  misc_feature (1)..(7): 2'-O-Methyl
  misc_feature (23)..(29): 2'-O-Methyl
ugagagaggctagctacaacgagaggaagn

SEQ ID NO: 16144 - DNA, 30 bp, Artificial Sequence
  Description of Artificial Sequence:  Nucleic Acid
  misc_feature (30)..(30): n stands for inverted deoxyabasic derivative
  misc_feature (1)..(7): 2'-O-Methyl
  misc_feature (23)..(29): 2'-O-Methyl
aggugaaggctagctacaacgaagcugagn

SEQ ID NO: 16145 - DNA, 30 bp, Artificial Sequence
  misc_feature (30)..(30): n stands for inverted deoxyabasic derivative
  misc_feature (1)..(7): 2'-O-Methyl
  misc_feature (23)..(29): 2'-O-Methyl
cuggugaggctagctacaacgaggaggcun

SEQ ID NO: 16146 - DNA, 30 bp, Artificial Sequence
  Description of Artificial Sequence:  Nucleic Acid
  misc_feature (30)..(30): n stands for inverted deoxyabasic derivative
  misc_feature (1)..(7): 2'-O-Methyl
  misc_feature (23)..(29): 2'-O-Methyl
ugguguaggctagctacaacgagcguugan

SEQ ID NO: 16147 - DNA, 30 bp, Artificial Sequence
  Description of Artificial Sequence:  Nucleic Acid
  misc_feature (30)..(30): n stands for inverted deoxyabasic derivative
  misc_feature (1)..(7): 2'-O-Methyl
  misc_feature (23)..(29): 2'-O-Methyl
aagaggaggctagctacaacgagcggcgan

SEQ ID NO: 16148 - DNA, 30 bp, Artificial Sequence
  Description of Artificial Sequence:  Nucleic Acid
  misc_feature (30)..(30): n stands for inverted deoxyabasic derivative
  misc_feature (1)..(7): 2'-O-Methyl
  misc_feature (23)..(29): 2'-O-Methyl
aaggagaggctagctacaacgagaaggcgn

SEQ ID NO: 16149 - DNA, 30 bp, Artificial Sequence
  Description of Artificial Sequence:  Nucleic Acid
  misc_feature (1)..(7): 2'-O-Methyl
  misc_feature (23)..(29): 2'-O-Methyl
  misc_feature (30)..(30): n stands for inverted deoxyabasic derivative
aggaggaggctagctacaacgagagagagn

SEQ ID NO: 16150 - DNA, 30 bp, Artificial Sequence
  Description of Artificial Sequence:  Nucleic Acid
  misc_feature (30)..(30): n stands for inverted deoxyabasic derivative
  misc_feature (1)..(7): 2'-O-Methyl
  misc_feature (23)..(29): 2'-O-Methyl
aggaguaggctagctacaacgaguggaggn

SEQ ID NO: 16151 - DNA, 30 bp, Artificial Sequence
  Description of Artificial Sequence:  Nucleic Acid
  misc_feature (30)..(30): n stands for inverted deoxyabasic derivative
  misc_feature (1)..(7): 2'-O-Methyl
  misc_feature (23)..(29): 2'-O-Methyl
guugugaggctagctacaacgauuggaggn

SEQ ID NO: 16152 - RNA, 33 nt, Artificial Sequence
  Description of Artificial Sequence:  Nucleic Acid
  misc_feature (1)..(4): phosphorothioate linkage
  misc_feature (18)..(19): n is an acyclic galactose-amine linker
  misc_feature (1)..(7): 2'-O-Methyl
  misc_feature (11)..(11): 2'-O-Methyl
  misc_feature (13)..(17): 2'-O-Methyl
  misc_feature (20)..(23): 2'-O-Methyl
  misc_feature (25)..(26): 2'-O-Methyl
  misc_feature (28)..(32): 2'-O-Methyl
  misc_feature (33)..(33): n stands for inverted deoxyabasic derivative
ccaagacngangaggcgnnagccgaaaggaccn

SEQ ID NO: 16153 - RNA, 38 nt, Artificial Sequence
  Description of Artificial Sequence:  Nucleic Acid
  misc_feature (6)..(9): phosphorothioate linkage
  misc_feature (1)..(5): n is an acyclic galactose-amine linker
  misc_feature (6)..(12): 2'-O-Methyl
  misc_feature (16)..(16): 2'-O-Methyl
  misc_feature (18)..(28): 2'-O-Methyl
  misc_feature (30)..(31): 2'-O-Methyl
  misc_feature (33)..(37): 2'-O-Methyl
  misc_feature (38)..(38): n stands for inverted deoxyabasic derivative
nnnnnccaagacngangaggcgnnagccgaaaggaccn

SEQ ID NO: 16154 - RNA, 37 nt, Artificial Sequence
  Description of Artificial Sequence:  Nucleic Acid
  misc_feature (4)..(7): phosphorothioate linkage
  misc_feature (1)..(3): n is an acyclic galactose-amine linker
  misc_feature (21)..(23): n is an acyclic galactose-amine linker
  misc_feature (4)..(10): 2'-O-Methyl
  misc_feature (14)..(14): 2'-O-Methyl
  misc_feature (16)..(20): 2'-O-Methyl
  misc_feature (24)..(27): 2'-O-Methyl
  misc_feature (29)..(30): 2'-O-Methyl
  misc_feature (32)..(36): 2'-O-Methyl
  misc_feature (37)..(37): n stands for inverted deoxyabasic derivative
nnnccaagacugangaggcgnnnagccgaaaggaccn

SEQ ID NO: 16155 - RNA, 34 nt, Artificial Sequence
  Description of Artificial Sequence:  Nucleic Acid
  misc_feature (1)..(4): phosphorothioate linkage
  misc_feature (18)..(20): n is an acyclic galactose-amine linker
  misc_feature (1)..(7): 2'-O-Methyl
  misc_feature (11)..(11): 2'-O-Methyl
  misc_feature (13)..(17): 2'-O-Methyl
  misc_feature (21)..(24): 2'-O-Methyl
  misc_feature (26)..(27): 2'-O-Methyl
  misc_feature (29)..(33): 2'-O-Methyl
  misc_feature (34)..(34): n stands for inverted deoxyabasic derivative
ccaagacngangaggcgnnnagccgaaaggaccn

SEQ ID NO: 16156 - RNA, 37 nt, Artificial Sequence
  Description of Artificial Sequence:  Nucleic Acid
  misc_feature (1)..(3): phosphorothioate ester linkage
  misc_feature (1)..(8): 2'-O-Methyl
  misc_feature (14)..(26): 2'-O-Methyl
  misc_feature (28)..(29): 2'-O-Methyl
  misc_feature (31)..(36): 2'-O-Methyl
  misc_feature (9)..(9): 2'-deoxy-2'-amino derivative
  misc_feature (12)..(12): 2'-deoxy-2'-amino derivative
  misc_feature (37)..(37): n is inverted deoxyabasic moiety
gcgugaacugaugaggccguuaggccgaaacaguagn

SEQ ID NO: 16157 - RNA, 37 nt, Artificial Sequence
  Description of Artificial Sequence:  Nucleic Acid
  misc_feature (1)..(3): phosphorothioate ester linkage
  misc_feature (1)..(8): 2'-O-Methyl
  misc_feature (14)..(26): 2'-O-Methyl
  misc_feature (28)..(29): 2'-O-Methyl
  misc_feature (31)..(36): 2'-O-Methyl
  misc_feature (9)..(9): 2'-deoxy-2'-amino derivative
  misc_feature (12)..(12): 2'-deoxy-2'-amino derivative
  misc_feature (37)..(37): n is inverted deoxyabasic moiety
auggcuacugaugaggccguuaggccgaaacgcuuun

SEQ ID NO: 16158 - RNA, 37 nt, Artificial Sequence
  Description of Artificial Sequence:  Nucleic Acid
  misc_feature (1)..(3): phosphorothioate ester linkage
  misc_feature (1)..(8): 2'-O-Methyl
  misc_feature (14)..(26): 2'-O-Methyl
  misc_feature (28)..(29): 2'-O-Methyl
  misc_feature (31)..(36): 2'-O-Methyl
  misc_feature (9)..(9): 2'-deoxy-2'-amino derivative
  misc_feature (12)..(12): 2'-deoxy-2'-amino derivative
  misc_feature (37)..(37): n is inverted deoxyabasic moiety
ccauggccugaugaggccguuaggccgaaagacgcun

SEQ ID NO: 16159 - RNA, 37 nt, Artificial Sequence
  Description of Artificial Sequence:  Nucleic Acid
  misc_feature (1)..(3): phosphorothioate ester linkage
  misc_feature (1)..(8): 2'-O-Methyl
  misc_feature (14)..(26): 2'-O-Methyl
  misc_feature (28)..(29): 2'-O-Methyl
  misc_feature (31)..(36): 2'-O-Methyl
  misc_feature (9)..(9): 2'-deoxy-2'-amino derivative
  misc_feature (12)..(12): 2'-deoxy-2'-amino derivative
  misc_feature (37)..(37): n is inverted deoxyabasic moiety
gcugcaccugaugaggccguuaggccgaaacacucan

SEQ ID NO: 16160 - RNA, 37 nt, Artificial Sequence
  Description of Artificial Sequence:  Nucleic Acid
  misc_feature (1)..(3): phosphorothioate ester linkage
  misc_feature (1)..(8): 2'-O-Methyl
  misc_feature (14)..(26): 2'-O-Methyl
  misc_feature (28)..(29): 2'-O-Methyl
  misc_feature (31)..(36): 2'-O-Methyl
  misc_feature (9)..(9): 2'-deoxy-2'-amino derivative
  misc_feature (12)..(12): 2'-deoxy-2'-amino derivative
  misc_feature (37)..(37): n is inverted deoxyabasic moiety
agaccaccugaugaggccguuaggccgaaauggcucn

SEQ ID NO: 16161 - RNA, 37 nt, Artificial Sequence
  Description of Artificial Sequence:  Nucleic Acid
  misc_feature (1)..(3): phosphorothioate ester linkage
  misc_feature (1)..(8): 2'-O-Methyl
  misc_feature (14)..(26): 2'-O-Methyl
  misc_feature (28)..(29): 2'-O-Methyl
  misc_feature (31)..(36): 2'-O-Methyl
  misc_feature (9)..(9): 2'-deoxy-2'-amino derivative
  misc_feature (12)..(12): 2'-deoxy-2'-amino derivative
  misc_feature (37)..(37): n is inverted deoxyabasic moiety
uuccgcacugaugaggccguuaggccgaaaccacuan

SEQ ID NO: 16162 - RNA, 37 nt, Artificial Sequence
  Description of Artificial Sequence:  Nucleic Acid
  misc_feature (1)..(3): phosphorothioate ester linkage
  misc_feature (1)..(8): 2'-O-Methyl
  misc_feature (14)..(26): 2'-O-Methyl
  misc_feature (28)..(29): 2'-O-Methyl
  misc_feature (31)..(36): 2'-O-Methyl
  misc_feature (9)..(9): 2'-deoxy-2'-amino derivative
  misc_feature (12)..(12): 2'-deoxy-2'-amino derivative
  misc_feature (37)..(37): n is inverted deoxyabasic moiety
uccggugcugaugaggccguuaggccgaaacucaccn

SEQ ID NO: 16163 - RNA, 37 nt, Artificial Sequence
  Description of Artificial Sequence:  Nucleic Acid
  misc_feature (1)..(3): phosphorothioate ester linkage
  misc_feature (1)..(8): 2'-O-Methyl
  misc_feature (14)..(26): 2'-O-Methyl
  misc_feature (28)..(29): 2'-O-Methyl
  misc_feature (31)..(36): 2'-O-Methyl
  misc_feature (9)..(9): 2'-deoxy-2'-amino derivative
  misc_feature (12)..(12): 2'-deoxy-2'-amino derivative
  misc_feature (37)..(37): n is inverted deoxyabasic moiety
aagaaagcugaugaggccguuaggccgaaacccggun

SEQ ID NO: 16164 - RNA, 37 nt, Artificial Sequence
  Description of Artificial Sequence:  Nucleic Acid
  misc_feature (1)..(3): phosphorothioate ester linkage
  misc_feature (1)..(8): 2'-O-Methyl
  misc_feature (14)..(26): 2'-O-Methyl
  misc_feature (28)..(29): 2'-O-Methyl
  misc_feature (31)..(36): 2'-O-Methyl
  misc_feature (9)..(9): 2'-deoxy-2'-amino derivative
  misc_feature (12)..(12): 2'-deoxy-2'-amino derivative
  misc_feature (37)..(37): n is inverted deoxyabasic moiety
uccaagacugaugaggccguuaggccgaaaggacccn

SEQ ID NO: 16165 - RNA, 37 nt, Artificial Sequence
  Description of Artificial Sequence:  Nucleic Acid
  misc_feature (1)..(3): phosphorothioate ester linkage
  misc_feature (1)..(8): 2'-O-Methyl
  misc_feature (14)..(26): 2'-O-Methyl
  misc_feature (28)..(29): 2'-O-Methyl
  misc_feature (31)..(36): 2'-O-Methyl
  misc_feature (9)..(9): 2'-deoxy-2'-amino derivative
  misc_feature (12)..(12): 2'-deoxy-2'-amino derivative
  misc_feature (37)..(37): n is inverted deoxyabasic moiety
auccaagcugaugaggccguuaggccgaaaaggaccn

SEQ ID NO: 16166 - RNA, 37 nt, Artificial Sequence
  Description of Artificial Sequence:  Nucleic Acid
  misc_feature (1)..(3): phosphorothioate ester linkage
  misc_feature (1)..(8): 2'-O-Methyl
  misc_feature (14)..(26): 2'-O-Methyl
  misc_feature (28)..(29): 2'-O-Methyl
  misc_feature (31)..(36): 2'-O-Methyl
  misc_feature (9)..(9): 2'-deoxy-2'-amino derivative
  misc_feature (12)..(12): 2'-deoxy-2'-amino derivative
  misc_feature (37)..(37): n is inverted deoxyabasic moiety
cuuucgccugaugaggccguuaggccgaaacccaacn

SEQ ID NO: 16167 - RNA, 37 nt, Artificial Sequence
  Description of Artificial Sequence:  Nucleic Acid
  misc_feature (1)..(3): phosphorothioate ester linkage
  misc_feature (1)..(8): 2'-O-Methyl
  misc_feature (14)..(26): 2'-O-Methyl
  misc_feature (28)..(29): 2'-O-Methyl
  misc_feature (31)..(36): 2'-O-Methyl
  misc_feature (9)..(9): 2'-deoxy-2'-amino derivative
  misc_feature (12)..(12): 2'-deoxy-2'-amino derivative
  misc_feature (37)..(37): n is inverted deoxyabasic moiety
guaccaccugaugaggccguuaggccgaaaggccuun

SEQ ID NO: 16168 - RNA, 37 nt, Artificial Sequence
  Description of Artificial Sequence:  Nucleic Acid
  misc_feature (1)..(3): phosphorothioate ester linkage
  misc_feature (1)..(8): 2'-O-Methyl
  misc_feature (14)..(26): 2'-O-Methyl
  misc_feature (28)..(29): 2'-O-Methyl
  misc_feature (31)..(36): 2'-O-Methyl
  misc_feature (9)..(9): 2'-deoxy-2'-amino derivative
  misc_feature (12)..(12): 2'-deoxy-2'-amino derivative
  misc_feature (37)..(37): n is inverted deoxyabasic moiety
cacucgccugaugaggccguuaggccgaaagcacccn

SEQ ID NO: 16169 - RNA, 37 nt, Artificial Sequence
  Description of Artificial Sequence:  Nucleic Acid
  misc_feature (1)..(3): phosphorothioate ester linkage
  misc_feature (1)..(8): 2'-O-Methyl
  misc_feature (14)..(26): 2'-O-Methyl
  misc_feature (28)..(29): 2'-O-Methyl
  misc_feature (31)..(36): 2'-O-Methyl
  misc_feature (9)..(9): 2'-deoxy-2'-amino derivative
  misc_feature (12)..(12): 2'-deoxy-2'-amino derivative
  misc_feature (37)..(37): n is inverted deoxyabasic moiety
ucuacgacugaugaggccguuaggccgaaaccucccn

SEQ ID NO: 16170 - RNA, 37 nt, Artificial Sequence
  Description of Artificial Sequence:  Nucleic Acid
  misc_feature (1)..(3): phosphorothioate ester linkage
  misc_feature (1)..(8): 2'-O-Methyl
  misc_feature (14)..(26): 2'-O-Methyl
  misc_feature (28)..(29): 2'-O-Methyl
  misc_feature (31)..(36): 2'-O-Methyl
  misc_feature (9)..(9): 2'-deoxy-2'-amino derivative
  misc_feature (12)..(12): 2'-deoxy-2'-amino derivative
  misc_feature (37)..(37): n is inverted deoxyabasic moiety
cacgguccugaugaggccguuaggccgaaacgagacn

SEQ ID NO: 16171 - RNA, 37 nt, Artificial Sequence; identical to SEQ ID NO: 16156
  Description of Artificial Sequence:  Nucleic Acid
  misc_feature (1)..(3): phosphorothioate ester linkage
  misc_feature (1)..(8): 2'-O-Methyl
  misc_feature (14)..(26): 2'-O-Methyl
  misc_feature (28)..(29): 2'-O-Methyl
  misc_feature (31)..(36): 2'-O-Methyl
  misc_feature (9)..(9): 2'-deoxy-2'-amino derivative
  misc_feature (12)..(12): 2'-deoxy-2'-amino derivative
  misc_feature (37)..(37): n is inverted deoxyabasic moiety

SEQ ID NO: 16172 - RNA, 37 nt, Artificial Sequence; identical to SEQ ID NO: 16157
  Description of Artificial Sequence:  Nucleic Acid
  misc_feature (1)..(3): phosphorothioate ester linkage
  misc_feature (1)..(8): 2'-O-Methyl
  misc_feature (14)..(26): 2'-O-Methyl
  misc_feature (28)..(29): 2'-O-Methyl
  misc_feature (31)..(36): 2'-O-Methyl
  misc_feature (9)..(9): 2'-deoxy-2'-amino derivative
  misc_feature (12)..(12): 2'-deoxy-2'-amino derivative
  misc_feature (37)..(37): n is inverted deoxyabasic moiety

SEQ ID NO: 16173 - RNA, 37 nt, Artificial Sequence; identical to SEQ ID NO: 16158
  Description of Artificial Sequence:  Nucleic Acid
  misc_feature (1)..(3): phosphorothioate ester linkage
  misc_feature (1)..(8): 2'-O-Methyl
  misc_feature (14)..(26): 2'-O-Methyl
  misc_feature (28)..(29): 2'-O-Methyl
  misc_feature (31)..(36): 2'-O-Methyl
  misc_feature (9)..(9): 2'-deoxy-2'-amino derivative
  misc_feature (12)..(12): 2'-deoxy-2'-amino derivative
  misc_feature (37)..(37): n is inverted deoxyabasic moiety

SEQ ID NO: 16174 - RNA, 37 nt, Artificial Sequence; identical to SEQ ID NO: 16159
  Description of Artificial Sequence:  Nucleic Acid
  misc_feature (1)..(3): phosphorothioate ester linkage
  misc_feature (1)..(8): 2'-O-Methyl
  misc_feature (14)..(26): 2'-O-Methyl
  misc_feature (28)..(29): 2'-O-Methyl
  misc_feature (31)..(36): 2'-O-Methyl
  misc_feature (9)..(9): 2'-deoxy-2'-amino derivative
  misc_feature (12)..(12): 2'-deoxy-2'-amino derivative
  misc_feature (37)..(37): n is inverted deoxyabasic moiety

SEQ ID NO: 16175 - RNA, 37 nt, Artificial Sequence; identical to SEQ ID NO: 16160
  Description of Artificial Sequence:  Nucleic Acid
  misc_feature (1)..(3): phosphorothioate ester linkage
  misc_feature (1)..(8): 2'-O-Methyl
  misc_feature (14)..(26): 2'-O-Methyl
  misc_feature (28)..(29): 2'-O-Methyl
  misc_feature (31)..(36): 2'-O-Methyl
  misc_feature (9)..(9): 2'-deoxy-2'-amino derivative
  misc_feature (12)..(12): 2'-deoxy-2'-amino derivative
  misc_feature (37)..(37): n is inverted deoxyabasic moiety

SEQ ID NO: 16176 - RNA, 37 nt, Artificial Sequence; identical to SEQ ID NO: 16161
  Description of Artificial Sequence:  Nucleic Acid
  misc_feature (1)..(3): phosphorothioate ester linkage
  misc_feature (1)..(8): 2'-O-Methyl
  misc_feature (14)..(26): 2'-O-Methyl
  misc_feature (28)..(29): 2'-O-Methyl
  misc_feature (31)..(36): 2'-O-Methyl
  misc_feature (9)..(9): 2'-deoxy-2'-amino derivative
  misc_feature (12)..(12): 2'-deoxy-2'-amino derivative
  misc_feature (37)..(37): n is inverted deoxyabasic moiety

SEQ ID NO: 16177 - RNA, 37 nt, Artificial Sequence; identical to SEQ ID NO: 16162
  Description of Artificial Sequence:  Nucleic Acid
  misc_feature (1)..(3): phosphorothioate ester linkage
  misc_feature (1)..(8): 2'-O-Methyl
  misc_feature (14)..(26): 2'-O-Methyl
  misc_feature (28)..(29): 2'-O-Methyl
  misc_feature (31)..(36): 2'-O-Methyl
  misc_feature (9)..(9): 2'-deoxy-2'-amino derivative
  misc_feature (12)..(12): 2'-deoxy-2'-amino derivative
  misc_feature (37)..(37): n is inverted deoxyabasic moiety

SEQ ID NO: 16178 - RNA, 37 nt, Artificial Sequence; identical to SEQ ID NO: 16163
  Description of Artificial Sequence:  Nucleic Acid
  misc_feature (1)..(3): phosphorothioate ester linkage
  misc_feature (1)..(8): 2'-O-Methyl
  misc_feature (14)..(26): 2'-O-Methyl
  misc_feature (28)..(29): 2'-O-Methyl
  misc_feature (31)..(36): 2'-O-Methyl
  misc_feature (9)..(9): 2'-deoxy-2'-amino derivative
  misc_feature (12)..(12): 2'-deoxy-2'-amino derivative
  misc_feature (37)..(37): n is inverted deoxyabasic moiety

SEQ ID NO: 16179 - RNA, 37 nt, Artificial Sequence; identical to SEQ ID NO: 16164
  Description of Artificial Sequence:  Nucleic Acid
  misc_feature (1)..(3): phosphorothioate ester linkage
  misc_feature (1)..(8): 2'-O-Methyl
  misc_feature (14)..(26): 2'-O-Methyl
  misc_feature (28)..(29): 2'-O-Methyl
  misc_feature (31)..(36): 2'-O-Methyl
  misc_feature (9)..(9): 2'-deoxy-2'-amino derivative
  misc_feature (12)..(12): 2'-deoxy-2'-amino derivative
  misc_feature (37)..(37): n is inverted deoxyabasic moiety

SEQ ID NO: 16180 - RNA, 37 nt, Artificial Sequence; identical to SEQ ID NO: 16165
  Description of Artificial Sequence:  Nucleic Acid
  misc_feature (1)..(3): phosphorothioate ester linkage
  misc_feature (1)..(8): 2'-O-Methyl
  misc_feature (14)..(26): 2'-O-Methyl
  misc_feature (28)..(29): 2'-O-Methyl
  misc_feature (31)..(36): 2'-O-Methyl
  misc_feature (9)..(9): 2'-deoxy-2'-amino derivative
  misc_feature (12)..(12): 2'-deoxy-2'-amino derivative
  misc_feature (37)..(37): n is inverted deoxyabasic moiety

SEQ ID NO: 16181 - RNA, 37 nt, Artificial Sequence; identical to SEQ ID NO: 16166
  Description of Artificial Sequence:  Nucleic Acid
  misc_feature (1)..(3): phosphorothioate ester linkage
  misc_feature (1)..(8): 2'-O-Methyl
  misc_feature (14)..(26): 2'-O-Methyl
  misc_feature (28)..(29): 2'-O-Methyl
  misc_feature (31)..(36): 2'-O-Methyl
  misc_feature (9)..(9): 2'-deoxy-2'-amino derivative
  misc_feature (12)..(12): 2'-deoxy-2'-amino derivative
  misc_feature (37)..(37): n is inverted deoxyabasic moiety

SEQ ID NO: 16182 - DNA, 20 bp, Artificial Sequence
  Description of Artificial Sequence:  Nucleic Acid
  misc_feature (1)..(19): phosphorothioate linkage
gtgctcatggtgcacggtct

SEQ ID NO: 16183 - DNA, 20 bp, Artificial Sequence
  Description of Artificial Sequence:  Nucleic Acid
  misc_feature (1)..(19): phosphorothioate linkage
tgatcaggtctgctgcgtgc

SEQ ID NO: 16184 - DNA, 20 bp, Artificial Sequence
  Description of Artificial Sequence:  Nucleic Acid
  misc_feature (1)..(19): phosphorothioate linkage
tgatcaggtctgctgcatgc

SEQ ID NO: 16185 - RNA, 15 nt, Artificial Sequence
  Description of Artificial Sequence:  Nucleic Acid Substrate
  misc_feature (1)..(7): n stands for any a, c, g, or u
  misc_feature (9)..(9): n stands for any a, c, g, or u
  misc_feature (13)..(15): n stands for any a, c, g, or u
nnnnnnnynghynnn

SEQ ID NO: 16186 - RNA, 47 nt, Artificial Sequence
  Description of Artificial Sequence:  Enzymatic Nucleic Acid
  misc_feature (1)..(4): n stands for any a, c, g, or u
  misc_feature (9)..(19): n stands for any a, c, g, or u
  misc_feature (25)..(31): n stands for any a, c, g, or u
  misc_feature (39)..(47): n stands for any a, c, g, or u
nnnngaagnnnnnnnnnnnaaahannnnnnnacauuacnnnnnnnnn

SEQ ID NO: 16187 - RNA, 15 nt, Artificial Sequence
  Description of Artificial Sequence:  Nucleic Acid Substrate
  misc_feature (1)..(6): n stands for a, c, g, or u
  misc_feature (9)..(15): n stands for a, c, g, or u
nnnnnnuhnnnnnnn

SEQ ID NO: 16188 - RNA, 36 nt, Artificial Sequence
  Description of Artificial Sequence:  Enzymatic Nucleic Acid
  misc_feature (1)..(7): n stands for a, c, g, or u
  misc_feature (16)..(18): n stands for a, c, g, or u
  misc_feature (23)..(25): n stands for a, c, g, or u
  misc_feature (31)..(36): n stands for a, c, g, or u
  misc_feature (1)..(8): 2'-O-Methyl
  misc_feature (12)..(12): 2'-O-Methyl
  misc_feature (14)..(26): 2'-O-Methyl
  misc_feature (28)..(29): 2'-O-Methyl
  misc_feature (31)..(36): 2'-O-Methyl
  misc_feature (9)..(9): 2'-deoxy-2'-C-Allyl
nnnnnnncugaugagnnngaaannncgaaannnnnn

SEQ ID NO: 16189 - RNA, 14 nt, Artificial Sequence
  Description of Artificial Sequence:  Nucleic Acid Substrate
  misc_feature (1)..(5): n stands for a, c, g, or u
  misc_feature (8)..(14): n stands for a, c, g, or u
nnnnnchnnnnnnn

SEQ ID NO: 16190 - RNA, 35 nt, Artificial Sequence
  Description of Artificial Sequence:  Enzymatic Nucleic Acid
  misc_feature (1)..(7): n stands for a, c, g, or u
  misc_feature (16)..(18): n stands for a, c, g, or u
  misc_feature (23)..(25): n stands for a, c, g, or u
  misc_feature (31)..(35): n stands for a, c, g, or u
  misc_feature (1)..(8): 2'-O-Methyl
  misc_feature (12)..(12): 2'-O-Methyl
  misc_feature (14)..(26): 2'-O-Methyl
  misc_feature (28)..(29): 2'-O-Methyl
  misc_feature (31)..(35): 2'-O-Methyl
  misc_feature (30)..(30): n stands for Inosine
  misc_feature (9)..(9): 2'-deoxy-2'-C-Allyl
nnnnnnncugaugagnnngaaannncgaannnnnn

SEQ ID NO: 16191 - RNA, 15 nt, Artificial Sequence
  Description of Artificial Sequence:  Nucleic Acid Substrate
  misc_feature (1)..(6): n stands for a, c, g, or u
  misc_feature (9)..(15): n stands for a, c, g, or u
nnnnnnygnnnnnnn

SEQ ID NO: 16192 - RNA, 35 nt, Artificial Sequence
  Description of Artificial Sequence:  Enzymatic Nucleic Acid
  misc_feature (1)..(7): n stands for a, c, g, or u
  misc_feature (29)..(35): n stands for a, c, g, or u
  misc_feature (1)..(8): 2'-O-Methyl
  misc_feature (13)..(16): 2'-O-Methyl
  misc_feature (18)..(35): 2'-O-Methyl
  misc_feature (11)..(11): Phosphorothioate 3'-Internucleotide Linkage
nnnnnnnugauggcaugcacuaugcgcgnnnnnnn

SEQ ID NO: 16193 - RNA, 16 nt, Artificial Sequence
  Description of Artificial Sequence:  Substrate Sequence
gccguggguugcacac

SEQ ID NO: 16194 - RNA, 48 nt, Artificial Sequence
  Description of Artificial Sequence:  Enzymatic Nucleic Acid
  misc_feature (1)..(8): 2'-O-Methyl
  misc_feature (12)..(21): 2'-O-Methyl
  misc_feature (32)..(37): 2'-O-Methyl
  misc_feature (44)..(48): 2'-O-Methyl
  misc_feature (9)..(10): 2'-deoxy-2'-amino
  misc_feature (22)..(26): 2'-deoxy-2'-amino
  misc_feature (38)..(40): 2'-deoxy-2'-amino
gugugcaaccggaggaaacucccuucaaggacgaaaguccgggacggg

SEQ ID NO: 16195 - RNA, 15 nt, Artificial Sequence
  Description of Artificial Sequence:  Substrate Sequence
gcgcggcgcaggcac

SEQ ID NO: 16196 - RNA, 36 nt, Artificial Sequence
  Description of Artificial Sequence:  Enzymatic Nucleic Acid
  misc_feature (1)..(7): 2'-O-Methyl
  misc_feature (36)..(36): 3'-3' inverted abasic moiety
  misc_feature (9)..(15): 2'-O-Methyl
  misc_feature (19)..(19): 2'-O-Methyl
  misc_feature (21)..(21): 2'-O-Methyl
  misc_feature (23)..(23): 2'-O-Methyl
  misc_feature (26)..(26): 2'-O-Methyl
  misc_feature (28)..(35): 2'-O-Methyl
  misc_feature (1)..(4): Phosphorothioate 3'-Internucleotide Linkage
  misc_feature (17)..(17): 2'-Deoxy-2'-Amino
  misc_feature (27)..(27): 2'-Deoxy-2'-Amino
gugccuggccgaaaggcgagugaggucugccgcgcn

SEQ ID NO: 16197 - DNA, 16 bp, Artificial Sequence
  Description of Artificial Sequence:  DNAzyme Motif
rggctagctacaacga

SEQ ID NO: 16198 - RNA, 366 nt, Artificial Sequence
  misc_feature: HCV 5' UTR
gccagcccccgauugggggcgacacuccaccauagaucacuccccugugaggaacuacugucuucacgcagaaagcgucuagccauggcguuaguaugagugucgugcagccuccaggacccccccucccggggagagccauaguggucugcggaaccggugaguacaccggaauugccaggacgaccggguccuuucuuggaucaacccgcucaaugccuggagauuugggcgugcccccgcgagacugcuagccgaguaguguugggucgcgaaaggccuugugguacuccugauagggugcuugcgagugccccgggaggucucguagaccgugcaccaugagcacgaauccuaaaccucaaa

SEQ ID NO: 16199 - RNA, 13 nt, Artificial Sequence
  Description of Artificial Sequence:  Nucleic Acid
  misc_feature (1)..(5): n is any nucleotide, unknown or otherwise, including any modifica tion
  misc_feature (7)..(13): n is any nucleotide, unknown or otherwise, including any modifica tion
nnnnnunnnnnnn

SEQ ID NO: 16200 - RNA, 35 nt, Artificial Sequence
  Description of Artificial Sequence:  Nucleic Acid
  misc_feature (1)..(4): phosphorothioate linkage
  misc_feature (35)..(35): n is inverted deoxyabasic moiety
  misc_feature (30)..(34): n is any nucleotide including any chemical modifications
  misc_feature (13)..(25): 2'-O-Methyl
  misc_feature (11)..(11): 2'-deoxy, 2'-amino derivative
  misc_feature (8)..(8): 2'-deoxy, 2'-amino derivative
  misc_feature (7)..(7): 2'-O-Methyl
  misc_feature (1)..(6): n is any nucleotide, including any chemical modifications
  misc_feature (27)..(28): 2'-O-Methyl
nnnnnncugaugaggccguuaggccgaaannnnnn

SEQ ID NO: 16201 - RNA, 10 nt, Artificial Sequence
  Description of Artificial Sequence:  Nucleic Acid
  misc_feature: X region of enzymatic nucleic acid
gccguuaggc

SEQ ID NO: 16202 - DNA, 22 bp, Artificial Sequence
  Description of Artificial Sequence:  Nucleic Acid Primer
cggtcggtaaagttgttccatt

SEQ ID NO: 16203 - DNA, 23 bp, Artificial Sequence
  Description of Artificial Sequence:  Nucleic Acid Primer
cctctgacacataattcgcctct

SEQ ID NO: 16204 - DNA, 28 bp, Artificial Sequence
  Description of Artificial Sequence:  Nucleic Acid Probe
tgaagcgaaggttgtggatctggatacc

SEQ ID NO: 16205 - DNA, 23 bp, Artificial Sequence
  Description of Artificial Sequence:  Nucleic Acid Primer
gtttattgaatcggacccaggat

SEQ ID NO: 16206 - DNA, 21 bp, Artificial Sequence
  Description of Artificial Sequence:  Nucleic Acid Primer
aggtgcatcttcttgcgaaaa

SEQ ID NO: 16207 - DNA, 30 bp, Artificial Sequence
  Description of Artificial Sequence:  Nucleic Acid Probe
cttttccaatgctattgttgaaggtgccaa
